(19) United States
(12) Patent Application Publication
(10) Pub. No.: US 2023/0345947 A1
(43) Pub. Date: Nov. 2, 2023

(54) RNA-BASED CONTROL OF LEPIDOPTERAN PESTS

(71) Applicant: GREENLIGHT BIOSCIENCES, INC., Lexington, MA (US)

(72) Inventors: Kenneth E. NARVA, Medford, MA (US); Krishnakumar SRIDHARAN, Medford, MA (US); Upendra Kumar DEVISETTY, Medford, MA (US); Thais BARROS RODRIGUES, Medford, MA (US); Cris OPPERT, Medford, MA (US); Suresh DESAI, Medford, MA (US); Sambit Kumar MISHRA, Medford, MA (US); Evelien VAN EKERT, Medford, MA (US)

(21) Appl. No.: 17/925,204

(22) PCT Filed: May 13, 2021
(86) PCT No.: PCT/US2021/032334

§ 371 Date: Nov. 14, 2022

Related U.S. Application Data
(60) Provisional application No. 63/024,133, filed on May 13, 2020.
(60) Provisional application No. 63/106,614, filed on Oct. 28, 2020.

(51) Int. Cl. A01N 63/60; C12N 15/113; C12N 15/82; C12P 19/34; A01P 7/04

(52) U.S. Cl. CPC A01N 63/60; C12N 15/113; C12N 15/8286; C12P 19/34; A01P 7/04; C12N 2310/14

(57) ABSTRACT

Disclosed herein are compositions and methods of controlling pests that involves administering RNA interfering agents. Particularly exemplified is the control of Lepidopteran species such as diamondback moths and fall armyworms. Also disclosed is the use of double-stranded RNA molecules to target certain genes in Lepidopteran species.

### RELATED APPLICATIONS

[0001] This application claims the benefit under 35 U.S.C. (s) 119(e) of U.S. provisional application No. 63/024,133 and U.S. provisional application No. 63/106,614, which are incorporated by reference herein in their entireties.

### BACKGROUND

[0002] Crops are often the target of insect attacks. Globally, farmers lose 30 to 40 percent of their crops due to pests and diseases, according to the UN Food and Agricultural Organization. Crop maintenance and crop health are essential for yield and quality of produce, which ultimately require long-term strategies for the minimization of pest and disease occurrence. The annual costs of controlling crop pests (e.g., Lepidoptera, Diptera, Coleoptera, Hemiptera, and others) are estimated to be in the tens of millions of dollars, with projected annual costs of crop loss reaching billions of dollars if left uncontrolled.

[0003] While chemical pesticides have been one solution for eradicating pest infestations, alternative, more environmentally safe, solutions are needed. Chemical pesticides are harmful to the environment and may lack specificity or selectivity which ultimately results in non-target effects. Additionally, given the slow metabolism of chemical pesticides and the likelihood of chemical pesticides to accumulate, resistance is likely to occur. Thus, there has been a long-felt need for more environmentally friendly methods for controlling or eradicating insect infestations which are more selective, environmentally safe, and biodegradable.

### SUMMARY

[0004] The present embodiments are related to control of Lepidopteran pests, especially those that are economically or agriculturally important pests. In various embodiments, the Lepidopteran pest is at least one selected from the group consisting of Spodoptera spp (such as S. frugiperda, a.k.a., fall armyworm)) and Plutella spp (such as P. xylostella a.k.a., diamondback moth)).

[0005] The compositions and methods described herein include recombinant polynucleotide molecules, such as recombinant DNA constructs for making transgenic plants resistant to infestation by Lepidopteran pests, and single- or double-stranded DNA or RNA molecules, referred to herein as “triggers”, that are useful for controlling or preventing infestation of a plant by that Lepidopteran pest. In some embodiments, polynucleotide triggers are provided as topically applied agents for controlling or preventing infestation of a plant by a Lepidopteran pest. In some embodiments, crop plants with improved resistance to infestation by Lepidopteran pest, such as transgenic crop plants (including seeds or propagatable parts such as tubers) expressing a polynucleotide trigger are provided. In some embodiments, crop plants (including seeds or propagatable parts such as tubers) that have been topically treated with a composition comprising a polynucleotide trigger (e.g., crop plants that have been sprayed with a solution of dsRNA molecules) are provided. Also provided are polynucleotide-containing compositions that are topically applied to a Lepidopteran pest or to a plant, plant part, or seed to be protected from infestation by a Lepidopteran pest.

[0006] Several embodiments relate to suppression of a target gene in a Lepidopteran pest by a polynucleotide trigger. Some embodiments relate to methods for selecting Lepidopteran target genes that may be effective targets for RNAi-mediated control of a Lepidopteran pest. In some embodiments, target genes selected for RNAi-mediated suppression are genes that are non-repetitive and non-redundant in a Lepidopteran pest genome, or that have low nucleotide diversity, or that are evolutionarily or functionally constrained to have a more synonymous (Kₛ) than nonsynonymous (Kₐ) nucleotide changes. Provided herein are nucleotide sequences referred to herein as the “Target Gene Sequences Group”, which consists of SEQ ID NOs: 1-114, 229-361, 495-511; 530-535, 542-822, 1104-1333, and 1564-1623. Also provided are nucleotide sequences referred to herein as the “Trigger Sequences Group”, which consists of SEQ ID NOs: 115-228, 362-494, 512-529; 536-541, 823-1103, 1334-1563, and 1624-1683. The SEQ ID NOs relate to the sequence provided in SEQ ID listing provided herewith.

[0007] In one aspect, a method for controlling a Lepidopteran pest infestation of a plant comprising contacting the Lepidopteran pest with a polynucleotide comprising at least one segment of 18 or more contiguous nucleotides with a sequence of about 95% to about 100% identity (e.g., a segment of 21 contiguous nucleotides with a sequence of 100% identity would be included) with a corresponding fragment of a DNA having a sequence selected from the Target Gene Sequences Group or the Trigger Sequences Group, or the DNA complement thereof. In an embodiment, the method for controlling a Lepidopteran pest infestation of a plant comprises contacting the Lepidopteran pest with a polynucleotide comprising a nucleotide sequence that is complementary to at least 18 contiguous nucleotides of a target gene having a nucleotide sequence selected from the group consisting of: SEQ ID NOs: 2, 5, 7, 9, 13, 21, 26, 27, 29, 36, 37, 39, 44, 47, 87, 95, 99, 103, 301, 309, 318, 319, 320, 321, 323, 324, 328, 341, 343, 346, 356, 358, 359, 503, 504, 505, 506, 509, 510, 530, 532, 533, 542, 545, 546, 547, 549, 551, 552, 553, 559, 560, 561, 563, 564, 570, 572, 573, 581, 593, 596, 602, 611, 612, 620, 665, 666, 672, 717, 730, 731, 736, 737, 738, 740, 741, 742, 743, 749, 757, 760, 761, 763, 766, 808, 809, 810, 814, 815, 817, 818, 821, 822, 1104, 1105, 1106, 1111, 1113, 1116, 1121, 1123, 1124, 1132, 1133, 1147, 1156, 1157, 1163, 1166, 1187, 1190, 1192, 1195, 1196, 1216, 1217, 1240, 1243, 1251, 1263, 1264, 1265, 1270, 1275, 1279, 1283, 1290, 1308, 1310, 1316, 1318, 1320, 1564, 1565, 1569, 1622, and 1623, or an RNA transcribed from the target gene. In some embodiments, the polynucleotide is double-stranded RNA. In some embodiments, the polynucleotide comprises one or more nucleotide sequences selected from the Trigger Sequences Group. In some embodiments, the contacting with a polynucleotide is achieved by topical application of the polynucleotide, or of a composition or solution containing the polynucleotide (e.g., by spraying or dusting or soaking), directly to the Lepidopteran pest or to a surface or matrix (e.g., a plant or soil) contacted by the Lepidopteran pest. In some embodiments, the contacting with a polynucleotide is achieved by providing a polynucleotide that is ingested by the Lepidopteran pest. In some embodiments, the contacting with a polynucleotide is achieved by providing a transgenic plant that expresses to the Lepidopteran pest.

[0008] Several embodiments relate to a method for controlling a Lepidopteran pest infestation of a plant by providing in the diet of a Lepidopteran pest an agent comprising a polynucleotide having at least one segment of 18 or more contiguous nucleotides with a sequence of about 95% to about 100% identity (e.g., a segment of 21 contiguous nucleotides with a sequence of 100% identity) with a corresponding fragment of a DNA having a sequence selected from the Target Gene Sequences Group, the Trigger Sequences Group, or the DNA complement of any thereof, and wherein the agent functions upon ingestion by the Lepidopteran pest to inhibit a biological function within the Lepidopteran pest thereby controlling infestation by the Lepidopteran pest. In an embodiment, the method for controlling a Lepidopteran pest infestation of a plant comprises providing in the diet of the Lepidopteran pest a polynucleotide comprising a nucleotide sequence that is complementary to at least 18 contiguous nucleotides of a target gene having a nucleotide sequence selected from the group consisting of: SEQ ID NOs: 2, 5, 7, 9, 13, 21, 26, 27, 29, 36, 37, 39, 44, 47, 87, 95, 99, 103, 301, 309, 318, 319, 320, 321, 323, 324, 328, 341, 343, 346, 356, 358, 359, 503, 504, 505, 506, 509, 510, 530, 532, 533, 542, 545, 546, 547, 549, 551, 552, 553, 559, 560, 561, 563, 564, 570, 572, 573, 581, 593, 596, 602, 611, 612, 620, 665, 666, 672, 717, 730, 731, 736, 737, 738, 740, 741, 742, 743, 749, 757, 760, 761, 763, 766, 808, 809, 810, 814, 815, 817, 818, 821, 822, 1104, 1105, 1106, 1111, 1113, 1116, 1121, 1123, 1124, 1132, 1133, 1147, 1156, 1157, 1163, 1166, 1187, 1190, 1192, 1195, 1196, 1216, 1217, 1240, 1243, 1251, 1263, 1264, 1265, 1270, 1275, 1279, 1283, 1290, 1308, 1310, 1316, 1318, 1320, 1564, 1565, 1569, 1622, and 1623, or an RNA transcribed from the target gene. In some embodiments, the polynucleotide comprises one or more nucleotide sequences selected from the Trigger Sequences Group. In some embodiments, the polynucleotide is double-stranded RNA. In some embodiments, the agent containing the polynucleotide is formulated for application to fields of crop plants, e.g., in sprayable solutions or emulsions, tank mixes, or powders. In some embodiments, the agent is biologically produced, e.g., in the form of a microbial fermentation product or expressed in a transgenic plant cell.

[0009] In another aspect, a method of causing mortality or stunting in Lepidopteran pest larvae is provided. In some embodiments, at least one RNA comprising at least one silencing element is provided in the diet of a Lepidopteran pest larvae wherein ingestion of the RNA by the Lepidopteran pest larvae results in mortality or stunting in the Lepidopteran pest larvae. In some embodiments, the silencing element is essentially identical or essentially complementary to a fragment of a target gene sequence of the Lepidopteran pest larvae, wherein the target gene is selected from the group consisting of the genes in the Target Gene Sequences Group. In an embodiment, the method of causing mortality or stunting in larvae of the Lepidopteran pest comprises providing in the diet of the larvae at least one polynucleotide comprising at least one silencing element comprising at least 18, 19, 20, or 21 contiguous nucleotides that are complementary to a target gene having a nucleotide sequence selected from the Target Gene Sequences Group. In a specific embodiment, the target gene is selected from the group consisting of: SEQ ID NOs: 2, 5, 7, 9, 13, 21, 26, 27, 29, 36, 37, 39, 44, 47, 87, 95, 99, 103, 301, 309, 318, 319, 320, 321, 323, 324, 328, 341, 343, 346, 356, 358, 359, 503, 504, 505, 506, 509, 510, 530, 532, 533, 542, 545, 546, 547, 549, 551, 552, 553, 559, 560, 561, 563, 564, 570, 572, 573, 581, 593, 596, 602, 611, 612, 620, 665, 666, 672, 717, 730, 731, 736, 737, 738, 740, 741, 742, 743, 749, 757, 760, 761, 763, 766, 808, 809, 810, 814, 815, 817, 818, 821, 822, 1104, 1105, 1106, 1111, 1113, 1116, 1121, 1123, 1124, 1132, 1133, 1147, 1156, 1157, 1163, 1166, 1187, 1190, 1192, 1195, 1196, 1216, 1217, 1240, 1243, 1251, 1263, 1264, 1265, 1270, 1275, 1279, 1283, 1290, 1308, 1310, 1316, 1318, 1320, 1564, 1565, 1569, 1622, and 1623, or an RNA transcribed from the target gene. In some embodiments, the silencing element comprises one or more nucleotide sequences selected from the Trigger Sequences Group. In some embodiments, the polynucleotide is double-stranded RNA. Some embodiments relate to a method of causing mortality or lower fecundity in Lepidopteran pest comprising providing in the diet of Lepidopteran pest at least one RNA comprising at least one silencing element essentially identical or essentially complementary to a fragment of a target gene sequence of the Lepidopteran pest larvae wherein ingestion of the RNA by the Lepidopteran pest results in mortality or lower fecundity in the Lepidopteran pest. In some embodiments, the target gene is selected from the group consisting of the genes in the Target Gene Sequences Group. In some embodiments, the method causes a decrease in metamorphosis rate or a decrease in feeding activity. In some embodiments, the method is useful for providing plants having increased resistance to infestation by Lepidopteran pest.

[0010] Several embodiments relate to a method of providing a plant having improved resistance to a Lepidopteran pest infestation comprising topically applying to the plant a composition comprising at least one polynucleotide having at least one segment of 18 or more contiguous nucleotides with a sequence of about 95% to about 100% identity (e.g., a segment of 21 contiguous nucleotides with a sequence of 100% identity) with a corresponding fragment of a DNA having a sequence selected from the Target Gene Sequences Group, the Trigger Sequences Group, or the DNA complement of any thereof. In an embodiment, the method of providing a plant having improved resistance to a Lepidopteran pest infestation comprises topically applying to the plant a composition comprising at least one polynucleotide comprising a nucleotide sequence that is complementary to at least 18 contiguous nucleotides of a target gene having a nucleotide sequence selected from the group consisting of: SEQ ID NOs: 2, 5, 7, 9, 13, 21, 26, 27, 29, 36, 37, 39, 44, 47, 87, 95, 99, 103, 301, 309, 318, 319, 320, 321, 323, 324, 328, 341, 343, 346, 356, 358, 359, 503, 504, 505, 506, 509, 510, 530, 532, 533, 542, 545, 546, 547, 549, 551, 552, 553, 559, 560, 561, 563, 564, 570, 572, 573, 581, 593, 596, 602, 611, 612, 620, 665, 666, 672, 717, 730, 731, 736, 737, 738, 740, 741, 742, 743, 749, 757, 760, 761, 763, 766, 808, 809, 810, 814, 815, 817, 818, 821, 822, 1104, 1105, 1106, 1111, 1113, 1116, 1121, 1123, 1124, 1132, 1133, 1147, 1156, 1157, 1163, 1166, 1187, 1190, 1192, 1195, 1196, 1216, 1217, 1240, 1243, 1251, 1263, 1264, 1265, 1270, 1275, 1279, 1283, 1290, 1308, 1310, 1316, 1318, 1320, 1564, 1565, 1569, 1622, and 1623, or an RNA transcribed from the target gene. In an embodiment, the method of providing a plant having improved resistance to a Lepidopteran pest infestation comprises topically applying to the plant a composition comprising at least one polynucleotide in a manner such that an effective amount of the polynucleotide is ingested by a Lepidopteran pest feeding on the plant, the polynucleotide comprising at least 18 contiguous nucleotides that are complementary to a target gene having a nucleotide sequence selected from the group consisting of: SEQ ID NOs: 2, 5, 7, 9, 13, 21, 26, 27, 29, 36, 37, 39, 44, 47, 87, 95, 99, 103, 301, 309, 318, 319, 320, 321, 323, 324, 328, 341, 343, 346, 356, 358, 359, 503, 504, 505, 506, 509, 510, 530, 532, 533, 542, 545, 546, 547, 549, 551, 552, 553, 559, 560, 561, 563, 564, 570, 572, 573, 581, 593, 596, 602, 611, 612, 620, 665, 666, 672, 717, 730, 731, 736, 737, 738, 740, 741, 742, 743, 749, 757, 760, 761, 763, 766, 808, 809, 810, 814, 815, 817, 818, 821, 822, 1104, 1105, 1106, 1111, 1113, 1116, 1121, 1123, 1124, 1132, 1133, 1147, 1156, 1157, 1163, 1166, 1187, 1190, 1192, 1195, 1196, 1216, 1217, 1240, 1243, 1251, 1263, 1264, 1265, 1270, 1275, 1279, 1283, 1290, 1308, 1310, 1316, 1318, 1320, 1564, 1565, 1569, 1622, and 1623, or an RNA transcribed from the target gene. In some embodiments, the polynucleotide comprises one or more nucleotide sequences selected from the Trigger Sequences Group. In some embodiments, the polynucleotide is double-stranded RNA. Several embodiments relate to compositions comprising the polynucleotide, formulated for application to fields of crop plants, e.g., in sprayable solutions or emulsions, tank mixes, or powders.

[0011] Several embodiments relate to an insecticidal composition for controlling a Lepidopteran pests comprising an insecticidally effective amount of at least one polynucleotide molecule comprising at least one segment of 18 or more contiguous nucleotides that are essentially identical or complementary (e.g., a segment of 21 contiguous nucleotides with a sequence of 100% identity or complementarity) with the corresponding fragment of DNA having a sequence selected from the Target Gene Sequences Group, the Trigger Sequences Group, or the DNA complement of any thereof. In some embodiments, the polynucleotide molecule comprises at least 18 contiguous nucleotides that are complementary to a target gene having a nucleotide sequence selected from the group consisting of: SEQ ID NOs: 2, 5, 7, 9, 13, 21, 26, 27, 29, 36, 37, 39, 44, 47, 87, 95, 99, 103, 301, 309, 318, 319, 320, 321, 323, 324, 328, 341, 343, 346, 356, 358, 359, 503, 504, 505, 506, 509, 510, 530, 532, 533, 542, 545, 546, 547, 549, 551, 552, 553, 559, 560, 561, 563, 564, 570, 572, 573, 581, 593, 596, 602, 611, 612, 620, 665, 666, 672, 717, 730, 731, 736, 737, 738, 740, 741, 742, 743, 749, 757, 760, 761, 763, 766, 808, 809, 810, 814, 815, 817, 818, 821, 822, 1104, 1105, 1106, 1111, 1113, 1116, 1121, 1123, 1124, 1132, 1133, 1147, 1156, 1157, 1163, 1166, 1187, 1190, 1192, 1195, 1196, 1216, 1217, 1240, 1243, 1251, 1263, 1264, 1265, 1270, 1275, 1279, 1283, 1290, 1308, 1310, 1316, 1318, 1320, 1564, 1565, 1569, 1622, and 1623, or an RNA transcribed from the target gene. In some embodiments, the polynucleotide comprises one or more nucleotide sequences selected from the Trigger Sequences Group. In some embodiments, the polynucleotide molecule is a recombinant polynucleotide. In some embodiments, the polynucleotide molecule is RNA. In some embodiments, the polynucleotide molecule is double-stranded RNA. Related embodiments include insecticidal compositions comprising the polynucleotide molecule formulated for application to fields of crop plants, e.g., in sprayable solutions or emulsions, tank mixes, or powders, and optionally comprising one or more additional components, such as a carrier agent, a surfactant, a cationic lipid, an organosilicone, an organosilicone surfactant, a polynucleotide herbicidal molecule, a non-polynucleotide herbicidal molecule, a non-polynucleotide pesticide, a safeners, and an insect growth regulator.

[0012] Several embodiments relate to a method of providing a plant having improved resistance to a Lepidopteran pest infestation comprising expressing in the plant at least one polynucleotide comprising at least one segment of 18 or more contiguous nucleotides that are essentially identical or complementary to (e.g., a segment of 21 contiguous nucleotides with a sequence of 100% identity or complementarity with) the corresponding fragment of DNA having a sequence selected from the Target Gene Sequences Group, the Trigger Sequences Group, or the DNA complement of any thereof. In some embodiments, the polynucleotide comprises one or more nucleotide sequences selected from the Trigger Sequences Group. In some embodiments, the polynucleotide is double-stranded RNA.

[0013] Several embodiments relate to a recombinant DNA construct comprising a heterologous promoter operably linked to a DNA element comprising at least one segment of 18 or more contiguous nucleotides with a sequence of about 95% to about 100% identity (e.g., a segment of 21 contiguous nucleotides with a sequence of 100% identity) with the corresponding fragment of DNA having a sequence selected from the Target Gene Sequences Group, the Trigger Sequences Group, or the DNA complement of any thereof. In some embodiments, the DNA element encodes a double-stranded RNA. In some embodiments, the double-stranded RNA comprises one or more nucleotide sequences selected from the Trigger Sequences Group. Related embodiments include a plant chromosome or a plastid or a recombinant plant virus vector or a recombinant baculovirus vector comprising the recombinant DNA construct, or comprising the DNA element without the heterologous promoter.

[0014] Several embodiments relate to a transgenic crop plant cell having in its genome a recombinant DNA encoding RNA that suppresses expression of a target gene in a Lepidopteran pest that contacts or ingests the RNA, wherein the RNA comprises at least one silencing element having at least one segment of 18 or more contiguous nucleotides complementary to a fragment of a target gene. In some embodiments, the target gene is selected from the Target Gene Sequences Group. A specific embodiment is a transgenic crop plant cell having in its genome a recombinant DNA encoding RNA for silencing one or more target genes selected from the Target Gene Sequences Group. In some embodiments, the RNA comprises one or more nucleotide sequences selected from the Trigger Sequences Group.

[0015] Several embodiments relate to an isolated recombinant RNA molecule that causes mortality or stunting of growth in a Lepidopteran pest when ingested or contacted by the Lepidopteran pest, wherein the recombinant RNA molecule comprises at least one segment of 18 or more contiguous nucleotides that are essentially complementary to (e.g., a segment of 21 contiguous nucleotides with a sequence of 100% complementarity with) the corresponding fragment of DNA having a sequence selected from the Target Gene Sequences Group, the Trigger Sequences Group, or the DNA complement of any thereof. In some embodiments, the recombinant RNA molecule is double-stranded RNA. Specific embodiments include an isolated recombinant double-stranded RNA molecule with a strand having a sequence selected from the group consisting of SEQ ID NOs: 115, 116, 119, 121, 123, 127, 135, 140, 141, 143, 150, 151, 153, 158, 161, 201, 209, 213, 217, 434, 442, 451, 452, 453, 454, 456, 457, 461, 474, 476, 479, 489, 491, 492, 521, 522, 523, 524, 527, 528, 536, 538, 539, 823, 826, 827, 828, 830, 832, 833, 834, 840, 841, 842, 844, 845, 851, 853, 854, 862, 874, 877, 883, 892, 893, 901, 946, 947, 953, 998, 1011, 1012, 1017, 1018, 1019, 1021, 1022, 1023, 1024, 1030, 1038, 1041, 1042, 1044, 1047, 1089, 1090, 1091, 1095, 1096, 1098, 1099, 1102, 1103, 1334, 1335, 1336, 1341, 1343, 1346, 1351, 1353, 1354, 1362, 1363, 1377, 1386, 1387, 1393, 1396, 1417, 1420, 1422, 1425, 1426, 1446, 1447, 1470, 1473, 1481, 1493, 1494, 1495, 1500, 1505, 1509, 1513, 1520, 1538, 1540, 1546, 1548, 1550, 1624, 1625, 1629, 1682, or 1683, or a combination thereof. Another embodiment pertains to an isolated recombinant double-stranded RNA molecule with a strand having a sequence selected from the group consisting of SEQ ID NOs: 434, 442, 451, 452, 453, 454, 456, 457, 461, 474, 476, 479, 489, 491, 492, 521, 522, 523, 524, 527, 528, 536, 538 and 539, or a combination thereof.

[0016] Several embodiments relate to a method of providing a plant having improved resistance to a Lepidopteran pest infestation comprising providing to the plant at least one polynucleotide comprising at least one segment of 18 or more contiguous nucleotides that are essentially identical or complementary to (e.g., a segment of 21 contiguous nucleotides with a sequence of 100% identity or complementarity with) the corresponding fragment of a target gene selected from the Target Gene Sequences Group. In an embodiment, the method of providing a plant having improved resistance to a Lepidopteran pest infestation comprises providing to the plant at least one polynucleotide comprising at least one segment that is identical or complementary to at least 18 contiguous nucleotides of a target gene or an RNA transcribed from the target gene, wherein the target gene is selected from the group consisting of: the genes identified in the Target Gene Sequences Group. In some embodiments, the polynucleotide comprises one or more nucleotide sequences selected from the Trigger Sequences Group. In some embodiments, the polynucleotide is double-stranded RNA.

[0017] Several embodiments relate to a method for controlling a Lepidopteran pest infestation of a plant comprising contacting the Lepidopteran pest with a polynucleotide comprising at least one segment of 18 or more contiguous nucleotides that are essentially identical or complementary to (e.g., a segment of 21 contiguous nucleotides with a sequence of 100% identity or complementarity with) the corresponding fragment of equivalent length of a DNA of a target gene selected from the Target Gene Sequences Group. In some embodiments, the polynucleotide is double-stranded RNA. Several embodiments relate to a method of selecting target genes for RNAi-mediated silencing from a plant genome or from an animal genome (e.g. insects and arthropods). In various embodiments, the method provides a subset of target genes that are present in single- or low-copy-number (non-repetitive and non-redundant) in a particular genome, or that have low nucleotide diversity, or that have a ratio of synonymous (Kₛ) to nonsynonymous (Kₐ) nucleotide changes where Kₛ>>Kₐ.

[0018] Several embodiments relate to man-made compositions comprising at least one polynucleotide as described herein. In some embodiments, formulations useful for topical application to a plant or substance in need of protection from a Lepidopteran pest infestation are provided. In some embodiments, recombinant constructs and vectors useful for making transgenic crop plant cells and transgenic crop plants are provided. In some embodiments, formulations and coatings useful for treating crop plants, crop plant seeds or propagatable parts such as tubers are provided. In some embodiments, commodity products and foodstuffs produced from such crop plants, seeds, or propagatable parts treated with or containing a polynucleotide as described herein (especially commodity products and foodstuffs having a detectable amount of a polynucleotide as described herein) are provided. Several embodiments relate to polyclonal or monoclonal antibodies that bind a protein encoded by a sequence or a fragment of a sequence selected from the Target Gene Sequences Group. Another aspect relates to polyclonal or monoclonal antibodies that bind a protein encoded by a sequence or a fragment of a sequence selected from the Trigger Sequences Group, or the complement thereof. Such antibodies are made by routine methods as known to one of ordinary skill in the art.

[0019] In the various embodiments described herein, the plant can be any plant that is subject to infestation by a Lepidopteran pest. Of particular interest are embodiments wherein the plant is a [name families of plants]. Examples include a plant selected from the group consisting of [name specific crops plants]. Embodiments include those wherein the plant is an ungerminated crop plant seed, a crop plant in a vegetative stage, or a crop plant in a reproductive stage.

[0020] Other aspects and specific embodiments of this invention are disclosed in the following detailed description.

### DETAILED DESCRIPTION

### I. Definitions

[0021] Unless defined otherwise, all technical and scientific terms used have the same meaning as commonly understood by one of ordinary skill in the art to which this invention belongs. Where a term is provided in the singular, the inventors also contemplate aspects of the invention described by the plural of that term. Where there are discrepancies in terms and definitions used in references that are incorporated by reference, the terms used in this application shall have the definitions given herein. Other technical terms used have their ordinary meaning in the art in which they are used, as exemplified by various art-specific dictionaries, for example, “The American Heritage® Science Dictionary” (Editors of the American Heritage Dictionaries, 2011, Houghton Mifflin Harcourt, Boston and New York), the “McGraw-Hill Dictionary of Scientific and Technical Terms” (6^{th} edition, 2002, McGraw-Hill, New York), or the “Oxford Dictionary of Biology” (6^{th} edition, 2008, Oxford University Press, Oxford and New York). The inventors do not intend to be limited to a mechanism or mode of action. Reference thereto is provided for illustrative purposes only.

[0022] Unless otherwise stated, nucleic acid sequences in the text of this specification are given, when read from left to right, in the 5′ to 3′ direction. One of skill in the art would be aware that a given DNA sequence is understood to define a corresponding RNA sequence which is identical to the DNA sequence except for replacement of the thymine (T) nucleotides of the DNA with uracil (U) nucleotides. Thus, providing a specific DNA sequence is understood to define the exact RNA equivalent and the term “identity” or “essentially identical” in reference to a DNA sequence includes an RNA sequence meeting these criteria except that thymine nucleotides are replaced with uracil nucleotides. A given first polynucleotide sequence, whether DNA or RNA, further defines the sequence of its exact complement (which can be DNA or RNA), a second polynucleotide that hybridizes perfectly to the first polynucleotide by forming Watson-Crick base-pairs. For DNA:DNA duplexes (hybridized strands), base-pairs are adenine:thymine or guanine:cytosine; for DNA:RNA duplexes, base-pairs are adenine:uracil or guanine:cytosine. Thus, the nucleotide sequence of a blunt-ended double-stranded polynucleotide that is perfectly hybridized (where there is “100% complementarity” between the strands or where the strands are “complementary”) is unambiguously defined by providing the nucleotide sequence of one strand, whether given as DNA or RNA. By “essentially identical” or “essentially complementary” to a target gene or a fragment of a target gene is meant that a polynucleotide strand (or at least one strand of a double-stranded polynucleotide) is designed to hybridize (generally under physiological conditions such as those found in a living plant or animal cell) to a target gene or to a fragment of a target gene or to the transcript of the target gene or the fragment of a target gene; one of skill in the art would understand that such hybridization does not necessarily require 100% sequence identity or complementarity. A first nucleic acid sequence is “operably” connected or “linked” with a second nucleic acid sequence when the first nucleic acid sequence is placed in a functional relationship with the second nucleic acid sequence. For example, a promoter sequence is “operably linked” to a DNA if the promoter provides for transcription or expression of the DNA. Generally, operably linked DNA sequences are contiguous.

[0023] The term “polynucleotide” commonly refers to a DNA or RNA molecule containing multiple nucleotides and generally refers both to “oligonucleotides” (a polynucleotide molecule of 18-25 nucleotides in length) and longer polynucleotides of 26 or more nucleotides. Polynucleotides also include molecules containing multiple nucleotides including non-canonical nucleotides or chemically modified nucleotides as commonly practiced in the art; see, e.g., chemical modifications disclosed in the technical manual “RNA Interference (RNAi) and DsiRNAs”, 2011 (Integrated DNA Technologies Coralville, Iowa). Generally, polynucleotides as described herein, whether DNA or RNA or both, and whether single- or double-stranded, include at least one segment of 18 or more contiguous nucleotides (or, in the case of double-stranded polynucleotides, at least 18 contiguous base-pairs) that are essentially identical or complementary to a fragment of equivalent size of the DNA of a target gene or the target gene's RNA transcript. Throughout this disclosure, “at least 18 contiguous” means “from about 18 to about 10,000, including every whole number point in between”. Thus, embodiments of this invention include oligonucleotides having a length of 18-25 nucleotides (18-mers, 19-mers, 20-mers, 21-mers, 22-mers, 23-mers, 24-mers, or 25-mers), or medium-length polynucleotides having a length of 26 or more nucleotides (polynucleotides of 26, 27, 28, 29, 30, 31, 32, 33, 34, 35, 36, 37, 38, 39, 40, 41, 42, 43, 44, 45, 46, 47, 48, 49, 50, 51, 52, 53, 54, 55, 56, 57, 58, 59, 60, about 65, about 70, about 75, about 80, about 85, about 90, about 95, about 100, about 110, about 120, about 130, about 140, about 150, about 160, about 170, about 180, about 190, about 200, about 210, about 220, about 230, about 240, about 250, about 260, about 270, about 280, about 290, or about 300 nucleotides), or long polynucleotides having a length greater than about 300 nucleotides (e.g., polynucleotides of between about 300 to about 400 nucleotides, between about 400 to about 500 nucleotides, between about 500 to about 600 nucleotides, between about 600 to about 700 nucleotides, between about 700 to about 800 nucleotides, between about 800 to about 900 nucleotides, between about 900 to about 1000 nucleotides, between about 300 to about 500 nucleotides, between about 300 to about 600 nucleotides, between about 300 to about 700 nucleotides, between about 300 to about 800 nucleotides, between about 300 to about 900 nucleotides, or about 1000 nucleotides in length, or even greater than about 1000 nucleotides in length, for example up to the entire length of a target gene including coding or non-coding or both coding and non-coding portions of the target gene). Where a polynucleotide is double-stranded, its length can be similarly described in terms of base pairs.

[0024] The polynucleotides described herein can be single-stranded (ss) or double-stranded (ds). “Double-stranded” refers to the base-pairing that occurs between sufficiently complementary, anti-parallel nucleic acid strands to form a double-stranded nucleic acid structure, generally under physiologically relevant conditions. Embodiments include those wherein the polynucleotide is selected from the group consisting of sense single-stranded DNA (ssDNA), sense single-stranded RNA (ssRNA), double-stranded RNA (dsRNA), double-stranded DNA (dsDNA), a double-stranded DNA/RNA hybrid, anti-sense ssDNA, or anti-sense ssRNA; a mixture of polynucleotides of any of these types can be used. In some embodiments, the polynucleotide is double-stranded RNA of a length greater than that which is typical of naturally occurring regulatory small RNAs (such as endogenously produced siRNAs and mature miRNAs). In some embodiments, the polynucleotide is double-stranded RNA of at least about 30 contiguous base-pairs in length. In some embodiments, the polynucleotide is double-stranded RNA with a length of between about 50 to about 500 base-pairs. In some embodiments, the polynucleotide can include components other than standard ribonucleotides, e.g., an embodiment is an RNA that comprises terminal deoxyribonucleotides.

[0025] Embodiments provide protection for crop plants against Lepidopteran pests. The crop plants include, but are not limited to, grain crop plants (such as wheat, oat, barley, maize, rye, triticale, rice, millet, sorghum, quinoa, amaranth, and buckwheat); forage crop plants (such as forage grasses and forage dicots including alfalfa, vetch, clover, and the like); oilseed crop plants (such as cotton, safflower, sunflower, soybean, canola, rapeseed, flax, peanuts, and oil palm); tree nuts (such as walnut, cashew, hazelnut, pecan, almond, and the like); sugarcane, coconut, date palm, olive, sugarbeet, tea, and coffee; wood- or pulp-producing trees; vegetable crop plants such as legumes (for example, beans, peas, lentils, alfalfa, peanut), lettuce, asparagus, artichoke, celery, carrot, radish, the brassicas (for example, cabbages, kales, mustards, and other leafy brassicas, broccoli, cauliflower, Brussels sprouts, turnip, kohlrabi), edible cucurbits (for example, cucumbers, melons, summer squashes, winter squashes), edible alliums (for example, onions, garlic, leeks, shallots, chives), edible members of the Solanaceae (for example, tomatoes, eggplants, potatoes, peppers, groundcherries), and edible members of the Chenopodiaceae (for example, beet, chard, spinach, quinoa, amaranth); fruit crop plants such as apple, pear, citrus fruits (for example, orange, lime, lemon, grapefruit, and others), stone fruits (for example, apricot, peach, plum, nectarine), banana, pineapple, grape, kiwifruit, papaya, avocado, and berries.

[0026] In various embodiments, the polynucleotide described herein comprise naturally occurring nucleotides, such as those which occur in DNA and RNA. In certain embodiments, the polynucleotide is a combination of ribonucleotides and deoxyribonucleotides, for example, synthetic polynucleotides consisting mainly of ribonucleotides but with one or more terminal deoxyribonucleotides or one or more terminal dideoxyribonucleotides or synthetic polynucleotides consisting mainly of deoxyribonucleotides but with one or more terminal dideoxyribonucleotides. In certain embodiments, the polynucleotide comprises non-canonical nucleotides such as inosine, thiouridine, or pseudouridine. In certain embodiments, the polynucleotide comprises chemically modified nucleotides. Examples of chemically modified oligonucleotides or polynucleotides are well known in the art; see, for example, U.S. Patent Publication 2011/0171287, U.S. Patent Publication 2011/0171176, U.S. Patent Publication 2011/0152353, U.S. Patent Publication 2011/0152346, and U.S. Patent Publication 2011/0160082, which are herein incorporated by reference. Illustrative examples include, but are not limited to, the naturally occurring phosphodiester backbone of an oligonucleotide or polynucleotide which can be partially or completely modified with phosphorothioate, phosphorodithioate, or methylphosphonate internucleotide linkage modifications, modified nucleoside bases or modified sugars can be used in oligonucleotide or polynucleotide synthesis, and oligonucleotides or polynucleotides can be labeled with a fluorescent moiety (e.g., fluorescein or rhodamine) or other label (e.g., biotin).

[0027] Several embodiments relate to a polynucleotide comprising at least one segment of 18 or more contiguous nucleotides with a sequence of about 95% to about 100% identity with a fragment of equivalent length of a DNA or target gene having a sequence selected from the Target Gene Sequences Group or the Trigger Sequences Group, or a RNA transcript of any thereof, or the DNA or RNA complement of any of the foregoing. In some embodiments, the contiguous nucleotides number at least 18, e.g., between 18-24, or between 18-28, or between 20-30, or between 20-50, or between 20-100, or between 50-100, or between 50-500, or between 100-250, or between 100-500, or between 200-1000, or between 500-2000, or even greater. In some embodiments, the contiguous nucleotides number more than 18, e.g., 19, 20, 21, 22, 23, 24, 25, 26, 27, 28, 29, 30, or greater than 30, e.g., at least about 35, at least about 40, at least about 45, at least about 50, at least about 55, at least about 60, at least about 65, at least about 70, at least about 75, at least about 80, at least about 85, at least about 90, at least about 95, at least about 100, at least about 110, at least about 120, at least about 130, at least about 140, at least about 150, at least about 160, at least about 170, at least about 180, at least about 190, at least about 200, at least about 210, at least about 220, at least about 230, at least about 240, at least about 250, at least about 260, at least about 270, at least about 280, at least about 290, at least about 300, at least about 350, at least about 400, at least about 450, at least about 500, or greater than 500 contiguous nucleotides. In some embodiments, the polynucleotide comprises at least one segment of at least 18, 19, 20, or 21 (reference to at least 18, 19, 20 or 21 as used throughout is intended to mean that any of these lower limits of the group can be individualized) contiguous nucleotides with a sequence of 100% identity with a fragment of equivalent length of a DNA or target gene having a sequence selected from the Target Gene Sequences Group or the Trigger Sequences Group, or the DNA or RNA complement of any of the foregoing. In some embodiments, the polynucleotide is a double-stranded nucleic acid (e.g., dsRNA) with one strand comprising at least one segment of at least 18, 19, 20, or 21 contiguous nucleotides with 100% identity with a fragment of equivalent length of a DNA or target gene having a sequence selected from the Target Gene Sequences Group or the Trigger Sequences Group, or the DNA or RNA complement of any of the foregoing; expressed as base-pairs, such a double-stranded nucleic acid comprises at least one segment of at least 18 contiguous, perfectly matched base-pairs which correspond to a fragment of equivalent length of a DNA or target gene having a sequence selected from the Target Gene Sequences Group or the Trigger Sequences Group, or the DNA or RNA complement of any of the foregoing. In some embodiments, each segment contained in the polynucleotide is of a length greater than that which is typical of naturally occurring regulatory small RNAs, for example, each segment is at least about 30 contiguous nucleotides (or base-pairs) in length. In some embodiments, the total length of the polynucleotide, or the length of each segment contained in the polynucleotide, is less than the total length of the DNA or target gene having a sequence selected from the Target Gene Sequences Group or the Trigger Sequences Group. In some embodiments, the total length of the polynucleotide is between about 50 to about 500 nucleotides (for single-stranded polynucleotides) or base-pairs (for double-stranded polynucleotides). In some embodiments, the polynucleotide is a dsRNA of between about 100 to about 500 base-pairs, such as a dsRNA of the length of any of the dsRNA triggers disclosed in Tables 1A, 1B and 1C. Embodiments include those in which the polynucleotide expressed in the plant is an RNA comprising a segment having a sequence selected from the group consisting of: SEQ ID NOs: 2, 5, 7, 9, 13, 21, 26, 27, 29, 36, 37, 39, 44, 47, 87, 95, 99, 103, 301, 309, 318, 319, 320, 321, 323, 324, 328, 341, 343, 346, 356, 358, 359, 503, 504, 505, 506, 509, 510, 530, 532, 533, 542, 545, 546, 547, 549, 551, 552, 553, 559, 560, 561, 563, 564, 570, 572, 573, 581, 593, 596, 602, 611, 612, 620, 665, 666, 672, 717, 730, 731, 736, 737, 738, 740, 741, 742, 743, 749, 757, 760, 761, 763, 766, 808, 809, 810, 814, 815, 817, 818, 821, 822, 1104, 1105, 1106, 1111, 1113, 1116, 1121, 1123, 1124, 1132, 1133, 1147, 1156, 1157, 1163, 1166, 1187, 1190, 1192, 1195, 1196, 1216, 1217, 1240, 1243, 1251, 1263, 1264, 1265, 1270, 1275, 1279, 1283, 1290, 1308, 1310, 1316, 1318, 1320, 1564, 1565, 1569, 1622, and 1623, or the complement thereof. In some embodiments, the polynucleotide is expressed in a plant. In some embodiments, the polynucleotide is topically provided to the surface of a plant or Lepidopteran pest.

[0028] Several embodiments relate to polynucleotides that are designed to modulate expression by inducing regulation or suppression of a Lepidopteran pest target gene. In some embodiments, the polynucleotides are designed to have a nucleotide sequence essentially identical or essentially complementary to the nucleotide sequence of a Lepidopteran pest target gene or cDNA (e.g., The Target Gene Sequences Group) or to the sequence of RNA transcribed from a Lepidopteran pest target gene, which can be coding sequence or non-coding sequence. These effective polynucleotide molecules that modulate expression may be referred to herein as a “polynucleotide”, “polynucleotide trigger”, “trigger”, or “triggers”.

[0029] Effective polynucleotides of any size can be used, alone or in combination, in the various methods and compositions described herein. In some embodiments, a single polynucleotide trigger is used to make a composition (e.g., a composition for topical application, or a recombinant DNA construct useful for making a transgenic plant). In other embodiments, a mixture or pool of different polynucleotide triggers is used; in such cases the polynucleotide triggers can be for a single target gene or for multiple target genes.

[0030] As used herein, the term “isolated” refers to separating a molecule from other molecules normally associated with it in its native or natural state. The term “isolated” thus may refer to a DNA molecule that has been separated from other DNA molecule(s) which normally are associated with it in its native or natural state. Such a DNA molecule may be present in a recombined state, such as a recombinant DNA molecule. Thus, DNA molecules fused to regulatory or coding sequences with which they are not normally associated, for example as the result of recombinant techniques, are considered isolated, even when integrated as a transgene into the chromosome of a cell or present with other DNA molecules.

[0031] As used herein, the term “Target Gene Sequences Group” refers to the group of sequences consisting of SEQ ID NOs: 1-114, 229-361, 495-511; 530-535, 542-822, 1104-1333, and 1564-1623. As used herein, the term “Trigger Sequences Group” refers to the group of sequences consisting of SEQ ID NOs: 115-228, 362-494, 512-529; 536-541, 823-1103, 1334-1563, and 1624-1683.

[0032] In various embodiments, the Lepidopteran pest is at least one insect selected from the group consisting of Spodoptera spp and Plutella spp. An example of a Spodoptera species includes S. frugiperda (fall armyworm). An example of a Plutella species includes P. xylostella (diamondback moth). The Lepidopteran pest may be at any stage of development.

[0033] Several embodiments relate to a polynucleotide designed to suppress one or more genes (“target genes”). The term “gene” refers to any portion of a nucleic acid that provides for expression of a transcript or encodes a transcript. A “gene” can include, but is not limited to, a promoter region, 5′ untranslated regions, transcript encoding regions that can include intronic regions, 3′ untranslated regions, or combinations of these regions. In some embodiments, the target genes can include coding or non-coding sequence or both. In other embodiments, the target gene has a sequence identical to or complementary to a messenger RNA, e.g., in some embodiments the target gene is a cDNA. In specific embodiments, the polynucleotide is designed to suppress one or more target genes, where each target gene is encoded by a DNA sequence selected from the Target Gene Sequences Group. In various embodiments, the polynucleotide is designed to suppress one or more target genes, where each target gene is encoded by a sequence selected from the Target Gene Sequences Group, and can be designed to suppress multiple target genes from this group, or to target different regions of one or more of these target genes. In an embodiment, the polynucleotide comprises multiple segments of 21 contiguous nucleotides with 100% identity with a fragment of equivalent length of a DNA or target gene having a sequence selected from the Target Gene Sequences Group or the Trigger Sequences Group, or an RNA transcript of any thereof, or the DNA or RNA complement any of the foregoing. In such cases, each segment can be identical or different in size or in sequence, and can be sense or anti-sense relative to the target gene. For example, in one embodiment the polynucleotide comprises multiple segments in tandem or repetitive arrangements, wherein each segment comprises 21 contiguous nucleotides with a sequence of 100% identity with a fragment of equivalent length of a DNA or target gene having a sequence selected from the Target Gene Sequences Group or Trigger Sequences Group, or the DNA or RNA complement of any of the foregoing. In some embodiments, the segments can be from different regions of the target gene, e.g., the segments can correspond to different exon regions of the target gene. In some embodiments, “spacer” nucleotides which do not correspond to a target gene can optionally be used in between or adjacent to the segments.

[0034] Other Definitions are provided in the sections below.

### II. Controlling Lepidopteran Infestations by Contacting with a Polynucleotide

[0035] Provided herein are methods for controlling a Lepidopteran pest infestation of a plant by contacting the Lepidopteran pest with a polynucleotide comprising at least one segment of 18 or more contiguous nucleotides having about 95% to about 100% identity or complementarity with a corresponding fragment of a DNA or target gene selected from the group consisting of: the Target Gene Sequences Group or the Trigger Sequences Group, or a RNA transcript of any thereof, or the DNA or RNA complement of any of the foregoing. In an embodiment, the method for controlling a Lepidopteran pest infestation of a plant comprises contacting the Lepidopteran pest with a polynucleotide comprising at least 18 contiguous nucleotides with 100% identity with a corresponding fragment of a target gene having a DNA sequence selected from the group consisting of: SEQ ID NOs: 2, 5, 7, 9, 13, 21, 26, 27, 29, 36, 37, 39, 44, 47, 87, 95, 99, 103, 301, 309, 318, 319, 320, 321, 323, 324, 328, 341, 343, 346, 356, 358, 359, 503, 504, 505, 506, 509, 510, 530, 532, 533, 542, 545, 546, 547, 549, 551, 552, 553, 559, 560, 561, 563, 564, 570, 572, 573, 581, 593, 596, 602, 611, 612, 620, 665, 666, 672, 717, 730, 731, 736, 737, 738, 740, 741, 742, 743, 749, 757, 760, 761, 763, 766, 808, 809, 810, 814, 815, 817, 818, 821, 822, 1104, 1105, 1106, 1111, 1113, 1116, 1121, 1123, 1124, 1132, 1133, 1147, 1156, 1157, 1163, 1166, 1187, 1190, 1192, 1195, 1196, 1216, 1217, 1240, 1243, 1251, 1263, 1264, 1265, 1270, 1275, 1279, 1283, 1290, 1308, 1310, 1316, 1318, 1320, 1564, 1565, 1569, 1622, and 1623, or the RNA transcript of any thereof, or the DNA or RNA complement of any of the foregoing. In some embodiments, the polynucleotide is a double-stranded RNA. In some embodiments, the polynucleotide (e.g., double-stranded RNA) is chemically or enzymatically synthesized or is produced by expression in a microorganism or by expression in a plant cell. Embodiments include those in which the polynucleotide is a dsRNA comprising a strand having a sequence selected from the Trigger Sequences Group. Polynucleotides of use in the method can be designed for multiple target genes. Related aspects of the invention include isolated polynucleotides of use in the method and plants having improved Lepidopteran resistance provided by the method. Specific embodiments include those in which the polynucleotide is a dsRNA comprising a sequence selected from the group consisting of SEQ ID NO: 115, 116, 119, 121, 123, 127, 135, 140, 141, 143, 150, 151, 153, 158, 161, 201, 209, 213, 217, 434, 442, 451, 452, 453, 454, 456, 457, 461, 474, 476, 479, 489, 491, 492, 521, 522, 523, 524, 527, 528, 536, 538, 539, 823, 826, 827, 828, 830, 832, 833, 834, 840, 841, 842, 844, 845, 851, 853, 854, 862, 874, 877, 883, 892, 893, 901, 946, 947, 953, 998, 1011, 1012, 1017, 1018, 1019, 1021, 1022, 1023, 1024, 1030, 1038, 1041, 1042, 1044, 1047, 1089, 1090, 1091, 1095, 1096, 1098, 1099, 1102, 1103, 1334, 1335, 1336, 1341, 1343, 1346, 1351, 1353, 1354, 1362, 1363, 1377, 1386, 1387, 1393, 1396, 1417, 1420, 1422, 1425, 1426, 1446, 1447, 1470, 1473, 1481, 1493, 1494, 1495, 1500, 1505, 1509, 1513, 1520, 1538, 1540, 1546, 1548, 1550, 1624, 1625, 1629, 1682, or 1683, or the complement thereof. Other specific embodiments include those in which the polynucleotide is a dsRNA comprising a sequence selected from the group consisting of to SEQ ID NOs: 434, 442, 451, 452, 453, 454, 456, 457, 461, 474, 476, 479, 489, 491, 492, 521, 522, 523, 524, 527, 528, 536, 538 and 539, or a combination thereof.

[0036] In some embodiments, the contiguous nucleotides have a sequence of about 95%, about 96%, about 97%, about 98%, about 99%, or about 100% identity with a fragment of equivalent length of a DNA or target gene having a sequence selected from the Target gene sequences group, or any RNA transcript thereof, or the DNA or RNA complement of any of the foregoing. In some embodiments, the contiguous nucleotides are exactly (100%) identical to a fragment of equivalent length of a DNA or target gene having a sequence selected from the Target Gene Sequences Group or the Trigger Sequences Group, or any RNA transcript thereof, or the DNA or RNA complement any of the foregoing. In some embodiments, the polynucleotide has an overall sequence of about 95%, about 96%, about 97%, about 98%, about 99%, or about 100% identity with a fragment of equivalent length of a DNA or target gene having a sequence selected from the Target Gene Sequences Group or the Trigger Sequences Group, or the DNA or RNA complement of any of the foregoing.

[0037] In an embodiment, the polynucleotide comprises at least one segment of 21 contiguous nucleotides with 100% identity with the corresponding fragment of a target gene having a DNA sequence selected from the group consisting of: SEQ ID NOs: 2, 5, 7, 9, 13, 21, 26, 27, 29, 36, 37, 39, 44, 47, 87, 95, 99, 103, 301, 309, 318, 319, 320, 321, 323, 324, 328, 341, 343, 346, 356, 358, 359, 503, 504, 505, 506, 509, 510, 530, 532, 533, 542, 545, 546, 547, 549, 551, 552, 553, 559, 560, 561, 563, 564, 570, 572, 573, 581, 593, 596, 602, 611, 612, 620, 665, 666, 672, 717, 730, 731, 736, 737, 738, 740, 741, 742, 743, 749, 757, 760, 761, 763, 766, 808, 809, 810, 814, 815, 817, 818, 821, 822, 1104, 1105, 1106, 1111, 1113, 1116, 1121, 1123, 1124, 1132, 1133, 1147, 1156, 1157, 1163, 1166, 1187, 1190, 1192, 1195, 1196, 1216, 1217, 1240, 1243, 1251, 1263, 1264, 1265, 1270, 1275, 1279, 1283, 1290, 1308, 1310, 1316, 1318, 1320, 1564, 1565, 1569, 1622, and 1623, or any RNA transcript thereof, or the DNA or RNA complement of any of the foregoing. In some embodiments, the polynucleotide comprises “neutral” sequence (sequence having no sequence identity or complementarity to the target gene) in addition to one or more segments of 21 contiguous nucleotides with 100% identity with the corresponding fragment of the target gene, and therefore the polynucleotide as a whole is of much lower overall sequence identity with a target gene.

[0038] The total length of the polynucleotide of use in this method can be greater than 18 contiguous nucleotides, and can include nucleotides in addition to the contiguous nucleotides having the sequence of about 95% to about 100% identity with a fragment of equivalent length of a DNA or target gene having a sequence selected from the group consisting of: the Target Gene Sequences Group or the Trigger Sequences Group, or any RNA transcript thereof, or the DNA or RNA complement of any of the foregoing. In other words, the total length of the polynucleotide can be greater than the length of the section or segment of the polynucleotide designed to suppress one or more target genes, where each target gene has a DNA sequence selected from the group consisting of the Target Gene Sequences Group. For example, the polynucleotide can have nucleotides flanking the “active” segment of at least one segment of 18 or more contiguous nucleotides that suppresses the target gene, or include “spacer” nucleotides between active segments, or can have additional nucleotides at the 5′ end, or at the 3′ end, or at both the 5′ and 3′ ends. In an embodiment, the polynucleotide can include additional nucleotides that are not specifically related (having a sequence not complementary or identical to) to the DNA or target gene having a sequence selected from the group consisting of: the Target Gene Sequences Group or the Trigger Sequences Group, or any RNA transcript thereof, or the DNA or RNA complement thereof, e.g., nucleotides that provide stabilizing secondary structure or for convenience in cloning or manufacturing. In an embodiment, the polynucleotide can include additional nucleotides located immediately adjacent to one or more segment of 18 or more contiguous nucleotides with a sequence of about 95% to about 100% identity with a fragment of equivalent length of a sequence selected from the group consisting of: the Target Gene Sequences Group or the Trigger Sequences Group, or any RNA transcript thereof, or the DNA or RNA complement of any of the foregoing. In an embodiment, the polynucleotide comprises one such segment, with an additional 5′ G or an additional 3′ C or both, adjacent to the segment. In another embodiment, the polynucleotide is a double-stranded RNA comprising additional nucleotides to form an overhang, for example, a dsRNA comprising 2 deoxyribonucleotides to form a 3′ overhang. Thus in various embodiments, the nucleotide sequence of the entire polynucleotide is not 100% identical or complementary to a sequence of contiguous nucleotides in the DNA or target gene having a sequence selected the Target Gene Sequences Group, the Trigger Sequences Group, or the DNA complement of any thereof. For example, in some embodiments the polynucleotide comprises at least two segments each of 21 contiguous nucleotides with a sequence of 100% identity with a fragment of a DNA having a sequence selected from the Target Gene Sequences Group or the Trigger Sequences Group, or the DNA complement of any of the foregoing, wherein (1) the at least two segments are separated by one or more spacer nucleotides, or (2) the at least two segments are arranged in an order different from that in which the corresponding fragments occur in the DNA having a sequence selected from the group consisting of: the Target Gene Sequences Group or the Trigger Sequences Group, or the DNA complement of any of the foregoing.

[0039] The polynucleotide of use in this method is provided by suitable means known to one in the art. Embodiments include those wherein the polynucleotide is chemically or enzymatically synthesized (e.g., by in vitro transcription, such as transcription using a T7 polymerase or other polymerase), produced by expression in a microorganism or in cell culture (such as plant or insect cells grown in culture), produced by expression in a plant cell, or produced by microbial fermentation.

[0040] In some embodiments the polynucleotide of use in this method is provided as an isolated DNA or RNA fragment. In some embodiments the polynucleotide of use in this method is not part of an expression construct and is lacking additional elements such as a promoter or terminator sequences). Such polynucleotides can be relatively short, such as single- or double-stranded polynucleotides of between about 18 to about 300 or between about 50 to about 500 nucleotides (for single-stranded polynucleotides) or between about 18 to about 300 or between about 50 to about 500 base-pairs (for double-stranded polynucleotides). In some embodiments, the polynucleotide is a dsRNA of between about 100 to about 500 base-pairs, such as a dsRNA of the length of any of the dsRNA triggers disclosed in Tables 1A, 1B and 1C. Alternatively the polynucleotide can be provided in more complex constructs, e.g., as part of a recombinant expression construct, or included in a recombinant vector, for example in a recombinant plant virus vector or in a recombinant baculovirus vector. In some embodiments such recombinant expression constructs or vectors are designed to include additional elements, such as expression cassettes for expressing a gene of interest (e.g., an insecticidal protein).

[0041] Several embodiments relate to a method for controlling a Lepidopteran pest infestation of a plant comprising contacting the Lepidopteran pest with a polynucleotide comprising at least one segment of 18 or more contiguous nucleotides that is essentially identical or complementary to a fragment of equivalent length of a DNA of a target gene selected from the group consisting of the genes identified in the Target Gene Sequences Group. In some embodiments the polynucleotide comprises a dsRNA with a strand having a sequence selected from the group consisting of the Trigger Sequences Group. In some embodiments, this invention provides a method for controlling a Lepidopteran pest infestation of a plant comprising contacting the Lepidopteran pest with an effective amount of a solution comprising a double-stranded RNA from the Trigger Sequences Group, the solution further comprises one or more components selected from the group consisting of an organosilicone surfactant or a cationic lipid.

[0042] In various embodiments of the method, the contacting comprises application to a surface of the Lepidopteran pest of a suitable composition comprising the polynucleotide of use in this method; such a composition can be provided, e.g., as a solid, liquid (including homogeneous mixtures such as solutions and non-homogeneous mixtures such as suspensions, colloids, micelles, and emulsions), powder, suspension, emulsion, spray, encapsulated or micro-encapsulation formulation, in or on microbeads or other carrier particulates, in a film or coating, or on or within a matrix, or as a seed treatment. The contacting can be in the form of a seed treatment, or in the form of treatment of “seed potato” tubers or pieces of tuber (e.g., by soaking, coating, or dusting the seed potato). Suitable binders, inert carriers, surfactants, and the like can optionally be included in the composition, as is known to one skilled in formulation of pesticides and seed treatments. In some embodiments, the contacting comprises providing the polynucleotide in a composition that further comprises one or more components selected from the group consisting of a carrier agent, a surfactant, a cationic lipid (such as that disclosed in Example 18 of U.S. patent application publication 2011/0296556, incorporated by reference herein), an organosilicone, an organosilicone surfactant, a polynucleotide herbicidal molecule, a non-polynucleotide herbicidal molecule, a non-polynucleotide pesticide, a safener, and an insect growth regulator. In some embodiments, the contacting comprises providing the polynucleotide in a composition that further comprises at least one pesticidal agent selected from the group consisting of a patatin, a plant lectin, a phytoecdysteroid, a Bacillus thuringiensis insecticidal protein, a Xenorhabdus insecticidal protein, a Photorhabdus insecticidal protein, a Bacillus laterosporus insecticidal protein, and a Bacillus sphaericus insecticidal protein. In one embodiment the contacting comprises providing the polynucleotide in a composition that can be ingested or otherwise absorbed internally by the Lepidopteran pest.

[0043] It is anticipated that the combination of certain polynucleotides of use in this method (e.g., the polynucleotide triggers described in the working Examples) with one or more non-polynucleotide pesticidal agents will result in an enhanced improvement in prevention or control of Lepidopteran pest infestations, when compared to the effect obtained with the polynucleotide alone or the non-polynucleotide pesticidal agent alone. In an embodiment, a composition containing one or more polynucleotides and one or more non-polynucleotide pesticidal agent selected from the group consisting of a patatin, a plant lectin, a phytoecdysteroid, a Bacillus thuringiensis insecticidal protein, a Xenorhabdus insecticidal protein, a Photorhabdus insecticidal protein, a Bacillus laterosporus insecticidal protein, and a Bacillus sphaericus insecticidal protein, is found to effect improved prevention or control of Lepidopteran pest infestations.

### III. Controlling Lepidopteran Infestations by Providing a Dietary Polynucleotide

[0044] Another aspect of this invention provides a method for controlling a Lepidopteran pest infestation of a plant comprising providing in the diet of a Lepidopteran pest an agent comprising a polynucleotide having at least one segment of 18 or more contiguous nucleotides with a sequence of about 95% to about 100% identity with a fragment of equivalent length of a DNA having a sequence selected from the group consisting of: The Target Gene Sequences Group, the Trigger Sequences Group, or the DNA complement thereof, wherein the agent functions upon ingestion by the Lepidopteran pest to inhibit a biological function within the Lepidopteran pest thereby controlling infestation by the Lepidopteran pest. The polynucleotide can be longer than the segment or segments it contains, but each polynucleotide segment and corresponding DNA fragment are of equivalent length. Polynucleotides of use in the method can be designed for multiple target genes. Embodiments include those in which the agent comprises a dsRNA comprising a strand having a sequence selected from the Trigger Sequences group, or the complement thereof, or wherein the agent comprises a polynucleotide or RNA encoded by a sequence selected from the group consisting of SEQ ID NOs: SEQ ID NO: 115, 116, 119, 121, 123, 127, 135, 140, 141, 143, 150, 151, 153, 158, 161, 201, 209, 213, 217, 434, 442, 451, 452, 453, 454, 456, 457, 461, 474, 476, 479, 489, 491, 492, 521, 522, 523, 524, 527, 528, 536, 538, 539, 823, 826, 827, 828, 830, 832, 833, 834, 840, 841, 842, 844, 845, 851, 853, 854, 862, 874, 877, 883, 892, 893, 901, 946, 947, 953, 998, 1011, 1012, 1017, 1018, 1019, 1021, 1022, 1023, 1024, 1030, 1038, 1041, 1042, 1044, 1047, 1089, 1090, 1091, 1095, 1096, 1098, 1099, 1102, 1103, 1334, 1335, 1336, 1341, 1343, 1346, 1351, 1353, 1354, 1362, 1363, 1377, 1386, 1387, 1393, 1396, 1417, 1420, 1422, 1425, 1426, 1446, 1447, 1470, 1473, 1481, 1493, 1494, 1495, 1500, 1505, 1509, 1513, 1520, 1538, 1540, 1546, 1548, 1550, 1624, 1625, 1629, 1682, or 1683. In another embodiment, the agent comprises a polynucleotide or RNA encoded by a sequence selected from the group consisting of SEQ ID NOs: 434, 442, 451, 452, 453, 454, 456, 457, 461, 474, 476, 479, 489, 491, 492, 521, 522, 523, 524, 527, 528, 536, 538 and 539, or a combination thereof. In an embodiment, a method for controlling a Lepidopteran pest infestation of a plant comprising providing in the diet of the Lepidopteran pest a polynucleotide comprising a nucleotide sequence that is complementary to at least 18 contiguous nucleotides of a target gene having a nucleotide sequence selected from the group consisting of: SEQ ID NOs: 2, 5, 7, 9, 13, 21, 26, 27, 29, 36, 37, 39, 44, 47, 87, 95, 99, 103, 301, 309, 318, 319, 320, 321, 323, 324, 328, 341, 343, 346, 356, 358, 359, 503, 504, 505, 506, 509, 510, 530, 532, 533, 542, 545, 546, 547, 549, 551, 552, 553, 559, 560, 561, 563, 564, 570, 572, 573, 581, 593, 596, 602, 611, 612, 620, 665, 666, 672, 717, 730, 731, 736, 737, 738, 740, 741, 742, 743, 749, 757, 760, 761, 763, 766, 808, 809, 810, 814, 815, 817, 818, 821, 822, 1104, 1105, 1106, 1111, 1113, 1116, 1121, 1123, 1124, 1132, 1133, 1147, 1156, 1157, 1163, 1166, 1187, 1190, 1192, 1195, 1196, 1216, 1217, 1240, 1243, 1251, 1263, 1264, 1265, 1270, 1275, 1279, 1283, 1290, 1308, 1310, 1316, 1318, 1320, 1564, 1565, 1569, 1622, and 1623, or an RNA transcribed from the target gene is provided. In some embodiments, the polynucleotide is a double-stranded RNA. In some embodiments, the polynucleotide (e.g., double-stranded RNA) is chemically or enzymatically synthesized or is produced by expression in a microorganism or by expression in a plant cell. Related aspects of the invention include isolated polynucleotides of use in the method and plants having improved Lepidopteran resistance provided by the method.

[0045] In various embodiments, the agent comprising a polynucleotide comprises a microbial cell or is produced in a microorganism. For example, the agent can include or can be produced in bacteria or yeast cells. In other embodiments the agent comprising a polynucleotide comprises a transgenic plant cell or is produced in a plant cell (for example a plant cell transiently expressing the polynucleotide); such plant cells can be cells in an plant or cells grown in tissue culture or in cell suspension.

[0046] In various embodiments, the agent comprising a polynucleotide is provided for dietary uptake by the Lepidopteran pest in a form suitable for ingestion, for example, as a solid, liquid (including homogeneous mixtures such as solutions and non-homogeneous mixtures such as suspensions, colloids, micelles, and emulsions), powder, suspension, emulsion, spray, encapsulated or micro-encapsulation formulation, in or on microbeads or other carrier particulates, in a film or coating, or on or within a matrix, or as a seed treatment. The agent comprising a polynucleotide can be provided for dietary uptake by the Lepidopteran pest by applying the agent to a plant subject to infestation by the Lepidopteran pest or by applying the agent to seed of the plant, for example by spraying, dusting, or coating the plant, or by application of a soil drench, or by providing in an artificial diet. The agent comprising a polynucleotide can be provided for dietary uptake by the Lepidopteran pest in an artificial diet formulated to meet the particular nutritional requirements for maintaining the Lepidopteran pest, wherein the artificial diet is supplemented with some amount of the polynucleotide obtained from a separate source such as chemical synthesis or purified from a microbial fermentation; this embodiment can be useful, e.g., for determining the timing and amounts of effective polynucleotide treatment regimes. In some embodiments the agent comprising a polynucleotide is provided for dietary uptake by the Lepidopteran pest in the form of a plant cell or in plant cell components, or in a microorganism (such as a bacterium or a yeast) or a microbial fermentation product, or in a synthetic or man-made diet. In one embodiment the agent comprising a polynucleotide is provided in the form of bait that is ingested by the Lepidopteran pest. The agent comprising a polynucleotide can be provided for dietary uptake by the Lepidopteran pest in the form of a seed treatment, or in the form of treatment of “seed potato” tubers or pieces of tuber (e.g., by soaking, coating, or dusting the seed potato). Suitable binders, inert carriers, surfactants, and the like can be included in the agent, as is known to one skilled in formulation of pesticides and seed treatments. In some embodiments, the agent comprising a polynucleotide further comprises one or more components selected from the group consisting of a carrier agent, a surfactant, a cationic lipid (such as that disclosed in Example 18 of U.S. patent application publication 2011/0296556, incorporated by reference herein), an organosilicone, an organosilicone surfactant, a polynucleotide herbicidal molecule, a non-polynucleotide herbicidal molecule, a non-polynucleotide pesticide, a safener, and an insect growth regulator. In some embodiments, the agent comprising a polynucleotide further comprises at least one pesticidal agent selected from the group consisting of a patatin, a plant lectin, a phytoecdysteroid, a phytoecdysteroid, a Bacillus thuringiensis insecticidal protein, a Xenorhabdus insecticidal protein, a Photorhabdus insecticidal protein, a Bacillus laterosporus insecticidal protein, and a Bacillus sphaericus insecticidal protein. Other proteins include plant-derived proteins described in Toxins (Basel). 2019 Jul. 1; 11(7). In some embodiments, the agent comprising a polynucleotide comprises at least one implantable formulation selected from the group consisting of a particulate, pellet, or capsule implanted in the plant; in such embodiments the method comprises implanting in the plant the implantable formulation. In some embodiments, the agent comprising a polynucleotide comprises at least one in-furrow formulation selected from the group consisting of a powder, granule, pellet, capsule, spray, or drench, or any other forms suited for applying to a furrow; in such embodiments, the method comprises an in-furrow treatment with the in-furrow formulation. In some embodiments, the method comprises treatment of a solanaceous plant seed, potato tuber, or piece of potato tuber with the agent.

[0047] It is anticipated that the combination of certain polynucleotides of use in agents of use in this method (e.g., the polynucleotide triggers described in the working Examples) with one or more non-polynucleotide pesticidal agents will result in an enhanced improvement in prevention or control of Lepidopteran pest infestations, when compared to the effect obtained with the polynucleotide alone or the non-polynucleotide pesticidal agent alone. In an embodiment, a composition containing one or more polynucleotides and one or more non-polynucleotide pesticidal agent selected from the group consisting of a patatin, a plant lectin, a phytoecdysteroid, a Bacillus thuringiensis insecticidal protein, a Xenorhabdus insecticidal protein, a Photorhabdus insecticidal protein, a Bacillus laterosporus insecticidal protein, and a Bacillus sphaericus insecticidal protein, is found to effect improved prevention or control of Lepidopteran pest infestations when provided to the Lepidopteran pest in a diet.

[0048] In some embodiments, the polynucleotide used in this method is a dsRNA comprising a segment having a sequence selected from the Trigger sequences group or the complement thereof, or wherein the polynucleotide is encoded by a sequence selected from the group consisting of SEQ ID NO: 115, 116, 119, 121, 123, 127, 135, 140, 141, 143, 150, 151, 153, 158, 161, 201, 209, 213, 217, 434, 442, 451, 452, 453, 454, 456, 457, 461, 474, 476, 479, 489, 491, 492, 521, 522, 523, 524, 527, 528, 536, 538, 539, 823, 826, 827, 828, 830, 832, 833, 834, 840, 841, 842, 844, 845, 851, 853, 854, 862, 874, 877, 883, 892, 893, 901, 946, 947, 953, 998, 1011, 1012, 1017, 1018, 1019, 1021, 1022, 1023, 1024, 1030, 1038, 1041, 1042, 1044, 1047, 1089, 1090, 1091, 1095, 1096, 1098, 1099, 1102, 1103, 1334, 1335, 1336, 1341, 1343, 1346, 1351, 1353, 1354, 1362, 1363, 1377, 1386, 1387, 1393, 1396, 1417, 1420, 1422, 1425, 1426, 1446, 1447, 1470, 1473, 1481, 1493, 1494, 1495, 1500, 1505, 1509, 1513, 1520, 1538, 1540, 1546, 1548, 1550, 1624, 1625, 1629, 1682, or 1683. In another embodiment, the agent comprises a polynucleotide or RNA encoded by a sequence selected from the group consisting of SEQ ID NOs: 434, 442, 451, 452, 453, 454, 456, 457, 461, 474, 476, 479, 489, 491, 492, 521, 522, 523, 524, 527, 528, 536, 538 and 539, or a combination thereof.

[0049] In some embodiments, the contiguous nucleotides have a sequence of at least about 95%, about 96%, about 97%, about 98%, about 99%, or about 100% identity with a fragment of equivalent length of a DNA or target gene having a sequence selected from The Target Gene Sequences Group or the Trigger Sequences Group, or any RNA transcript thereof, or the DNA or RNA complement of any of the foregoing. In some embodiments the contiguous nucleotides are exactly (100%) identical to a fragment of equivalent length of a DNA or target gene having a sequence selected from The Target Gene Sequences Group or the Trigger Sequences Group, or any RNA transcript thereof, or the DNA or RNA complement of any of the foregoing. In some embodiments, the polynucleotide has an overall sequence of at least about 95%, about 96%, about 97%, about 98%, about 99%, or about 100% identity with a fragment of equivalent length of a DNA or target gene having a sequence selected from The Target Gene Sequences Group or the Trigger Sequences Group, or any RNA transcript thereof, or the DNA or RNA complement of any of the foregoing. In an embodiment, the polynucleotide comprises at least one segment of 21 contiguous nucleotides with a sequence of 100% identity with the corresponding fragment of a target gene having a DNA sequence selected from the group consisting of: SEQ ID NOs: 2, 5, 7, 9, 13, 21, 26, 27, 29, 36, 37, 39, 44, 47, 87, 95, 99, 103, 301, 309, 318, 319, 320, 321, 323, 324, 328, 341, 343, 346, 356, 358, 359, 503, 504, 505, 506, 509, 510, 530, 532, 533, 542, 545, 546, 547, 549, 551, 552, 553, 559, 560, 561, 563, 564, 570, 572, 573, 581, 593, 596, 602, 611, 612, 620, 665, 666, 672, 717, 730, 731, 736, 737, 738, 740, 741, 742, 743, 749, 757, 760, 761, 763, 766, 808, 809, 810, 814, 815, 817, 818, 821, 822, 1104, 1105, 1106, 1111, 1113, 1116, 1121, 1123, 1124, 1132, 1133, 1147, 1156, 1157, 1163, 1166, 1187, 1190, 1192, 1195, 1196, 1216, 1217, 1240, 1243, 1251, 1263, 1264, 1265, 1270, 1275, 1279, 1283, 1290, 1308, 1310, 1316, 1318, 1320, 1564, 1565, 1569, 1622, and 1623, or the DNA complement thereof; in some embodiments, the polynucleotide comprises “neutral” sequence (having no sequence identity or complementarity to the target gene) in addition to a segment of 21 contiguous nucleotides with 100% identity with the corresponding fragment of the target gene, and therefore the polynucleotide as a whole is of much lower overall sequence identity with a target gene.

[0050] The polynucleotide of use in this method is generally designed to suppress one or more genes (“target genes”). In other embodiments, the target gene has a sequence identical to or complementary to a messenger RNA, e.g., in some embodiments the target gene is a cDNA. In specific embodiments, the polynucleotide is designed to suppress one or more target genes, where each target gene has a DNA sequence selected from the group consisting of the Target Gene Sequences Group. In various embodiments, the polynucleotide is designed to suppress one or more target genes, where each target gene has a sequence selected from the group consisting of the Target Gene Sequences Group, and can be designed to suppress multiple target genes from this group, or to target different regions of one or more of these target genes. In an embodiment, the polynucleotide comprises multiple segments of 21 contiguous nucleotides with a sequence of 100% identity with a fragment of equivalent length of a DNA or target gene having a sequence selected from The Target Gene Sequences Group or the Trigger Sequences Group, or any RNA transcript thereof, or the DNA or RNA complement of any of the foregoing. In such cases, each segment can be identical or different in size or in sequence, and can be sense or anti-sense relative to the target gene. For example, in one embodiment the polynucleotide comprises multiple segments in tandem or repetitive arrangements, wherein each segment comprises 21 contiguous nucleotides with a sequence of 100% identity with a fragment of equivalent length of a DNA or target gene having a sequence selected from The Target Gene Sequences Group or the Trigger Sequences Group, or any RNA transcript thereof, or the DNA or RNA complement of any of the foregoing; the segments can be from different regions of the target gene, e.g., the segments can correspond to different exon regions of the target gene, and “spacer” nucleotides which do not correspond to a target gene can optionally be used in between or adjacent to the segments.

[0051] The total length of the polynucleotide of use in this method can be greater than 18 contiguous nucleotides, and can include nucleotides in addition to the contiguous nucleotides having the sequence of about 95% to about 100% identity with a fragment of equivalent length of a DNA or target gene having a sequence selected from The Target Gene Sequences Group or the Trigger Sequences Group, or any RNA transcript thereof, or the DNA or RNA complement of any of the foregoing. In other words, the total length of the polynucleotide can be greater than the length of the section or segment of the polynucleotide designed to suppress one or more target genes, where each target gene has a DNA sequence selected from the group consisting of the Target Gene Sequences Group or the Trigger Sequences Group. For example, the polynucleotide can have nucleotides flanking the “active” segment of at least one segment of 18 or more contiguous nucleotides that suppresses the target gene, or include “spacer” nucleotides between active segments, or can have additional nucleotides at the 5′ end, or at the 3′ end, or at both the 5′ and 3′ ends. In an embodiment, the polynucleotide can include additional nucleotides that are not specifically related (having a sequence not complementary or identical to) to the DNA or target gene having a sequence selected from the Target Gene Sequences Group, the Trigger Sequences Group, or the DNA complement of any thereof, e.g., nucleotides that provide stabilizing secondary structure or for convenience in cloning or manufacturing. In an embodiment, the polynucleotide can include additional nucleotides located immediately adjacent to one or more segment of 18 or more contiguous nucleotides with a sequence of about 95% to about 100% identity with a fragment of equivalent length of a DNA or target gene having a sequence selected from the Target Gene Sequences Group, the Trigger Sequences Group, or the DNA complement of any thereof. In an embodiment, the polynucleotide comprises one such segment, with an additional 5′ G or an additional 3′ C or both, adjacent to the segment. In another embodiment, the polynucleotide is a double-stranded RNA comprising additional nucleotides to form an overhang, for example, a dsRNA comprising 2 deoxyribonucleotides to form a 3′ overhang. Thus in various embodiments, the nucleotide sequence of the entire polynucleotide is not 100% identical or complementary to a sequence of contiguous nucleotides in the DNA or target gene having a sequence selected from The Target Gene Sequences Group, the Trigger Sequences Group, or the DNA complement of any thereof. For example, in some embodiments the polynucleotide comprises at least two segments of 21 contiguous nucleotides with a sequence of 100% identity with a fragment of a DNA having a sequence selected from The Target Gene Sequences Group, the Trigger Sequences Group, or the DNA complement of any thereof, wherein (1) the at least two segments are separated by one or more spacer nucleotides, or (2) the at least two segments are arranged in an order different from that in which the corresponding fragments occur in the DNA having a sequence selected from The Target Gene Sequences Group, the Trigger Sequences Group, or the DNA complement of any thereof.

[0052] The polynucleotide of use in this method is provided by suitable means known to one in the art. Embodiments include those wherein the polynucleotide is chemically or enzymatically synthesized (e.g., by in vitro transcription, such as transcription using a T7 polymerase or other polymerase), produced by expression in a microorganism or in cell culture (such as plant or insect cells grown in culture), produced by expression in a plant cell, or produced by microbial fermentation.

[0053] In some embodiments the polynucleotide of use in this method is provided as an isolated DNA or RNA fragment. In some embodiments the polynucleotide of use in this method is not part of an expression construct and is lacking additional elements such as a promoter or terminator sequences. Such polynucleotides can be relatively short, such as single- or double-stranded polynucleotides of between about 18 to about 300 or between about 50 to about 500 nucleotides (for single-stranded polynucleotides) or between about 18 to about 300 or between about 50 to about 500 base-pairs (for double-stranded polynucleotides). In some embodiments, the polynucleotide is a dsRNA of between about 100 to about 500 base-pairs, such as a dsRNA of the length of any of the dsRNA triggers disclosed in Tables 1A, 1B and 1C. Alternatively the polynucleotide can be provided in more complex constructs, e.g., as part of a recombinant expression construct, or included in a recombinant vector, for example in a recombinant plant virus vector or in a recombinant baculovirus vector. In some embodiments such recombinant expression constructs or vectors are designed to include additional elements, such as expression cassettes for expressing a gene of interest (e.g., an insecticidal protein).

### IV. Controlling Lepidopteran Infestations by Providing a Dietary RNA

[0054] Another aspect of this invention provides a method of causing mortality or stunting in larvae of the Lepidopteran pest by providing in the diet of the larvae at least one polynucleotide comprising at least one silencing element comprising at least 18, 19, 20, or 21 contiguous nucleotides that are complementary to a target gene having a nucleotide sequence selected from the Target Gene Sequences Group, or an RNA transcribed from the target gene. In some embodiments, the polynucleotide is a double-stranded RNA. In some embodiments, the polynucleotide (e.g., double-stranded RNA) is chemically or enzymatically synthesized or is produced by expression in a microorganism or by expression in a plant cell. In an embodiment, a method of causing mortality or stunting in Lepidopteran pest larvae comprising providing in the diet of Lepidopteran pest larvae at least one RNA comprising at least one silencing element essentially identical or essentially complementary to a fragment of a target gene sequence of the Lepidopteran pest larvae, wherein the target gene sequence is selected from the Target Gene Sequences Group, and wherein ingestion of the RNA by the Lepidopteran pest larvae results in mortality or stunting in the Lepidopteran pest larvae is provided. A related aspect of this invention is an RNA comprising at least one silencing element, wherein the at least one silencing element is essentially identical or essentially complementary to a fragment of a target gene of the Lepidopteran pest larvae, wherein the target gene sequence is selected from the Target Gene Sequences Group. The RNA can be longer than the silencing element or silencing elements it contains, but each silencing element and corresponding fragment of a target gene sequence are of equivalent length. RNAs of use in the method can be designed for multiple target genes. Embodiments include those in which the RNA comprises a dsRNA with a strand having a sequence selected from the Trigger Sequences Group. In a related aspect, a method of causing mortality or lower fecundity in Lepidopteran pest comprising providing in the diet of Lepidopteran pest at least one RNA comprising at least one silencing element essentially identical or essentially complementary to a fragment of a target gene sequence of the Lepidopteran pest larvae, wherein the target gene sequence is selected from The Target Gene Sequences Group, the Trigger Sequences Group, or the DNA complement of any thereof, and wherein ingestion of the RNA by the Lepidopteran pest results in mortality or lower fecundity in the Lepidopteran pest is provided. Related aspects of the invention include isolated RNAs of use in the method and plants having improved Lepidopteran resistance provided by the method.

[0055] In various embodiments, the diet providing the RNA comprises a microbial cell or is produced in a microorganism. For example, the diet providing the RNA can include or can be produced in bacteria or yeast cells. In similar embodiments the diet providing the RNA comprises a transgenic plant cell or is produced in a plant cell (for example a plant cell transiently expressing the polynucleotide); such plant cells can be cells in an plant or cells grown in tissue culture or in cell suspension.

[0056] In one embodiment the diet providing the RNA is provided in the form of any plant that is subject to infestation by a Lepidopteran pest, wherein the RNA is contained in or on the plant. Such plants can be stably transgenic plants that express the RNA, or non-transgenic plants that transiently express the RNA or that have been treated with the RNA, e.g., by spraying or coating. Stably transgenic plants generally contain integrated into their genome a recombinant construct that encodes the RNA. Of particular interest are embodiments wherein the plant is a crop plant.

[0057] In various embodiments, the diet providing the RNA is provided in a form suitable for ingestion by the Lepidopteran pest, for example, as a solid, liquid (including homogeneous mixtures such as solutions and non-homogeneous mixtures such as suspensions, colloids, micelles, and emulsions), powder, suspension, emulsion, spray, encapsulated or micro-encapsulation formulation, in or on microbeads or other carrier particulates, in a film or coating, or on or within a matrix, or as a seed treatment. The diet providing the RNA can be provided by applying the diet to a plant subject to infestation by the Lepidopteran pest, for example by spraying, dusting, or coating the plant, or by application of a soil drench, or by providing in an artificial diet. In one embodiment the diet providing the recombinant RNA is provided in the form of bait that is ingested by the Lepidopteran pest. The diet providing the RNA can be an artificial diet formulated to meet the particular nutritional requirements for maintaining the Lepidopteran pest, wherein the artificial diet is supplemented with some amount of the RNA obtained from a separate source such as chemical synthesis or purified from a microbial fermentation; this embodiment can be useful, e.g., for determining the timing and amounts of effective polynucleotide treatment regimes. In some embodiments the diet providing the RNA is provided in the form of a plant cell or in plant cell components, or in a microorganism (such as a bacterium or a yeast) or a microbial fermentation product, or in a synthetic diet. In one embodiment the diet providing the RNA is provided in the form of bait that is ingested by the Lepidopteran pest. The diet providing the RNA can be provided in the form of a seed treatment, or in the form of treatment of “seed potato” tubers or pieces of tuber (e.g., by soaking, coating, or dusting the seed potato). Suitable binders, inert carriers, surfactants, and the like can be included in the diet, as is known to one skilled in formulation of pesticides and seed treatments. In some embodiments, the diet providing the RNA further comprises one or more components selected from the group consisting of a carrier agent, a surfactant, a cationic lipid (such as that disclosed in Example 18 of U.S. patent application publication 2011/0296556, incorporated by reference herein), an organosilicone, an organosilicone surfactant, a polynucleotide herbicidal molecule, a non-polynucleotide herbicidal molecule, a non-polynucleotide pesticide, a safener, and an insect growth regulator. In some embodiments, the diet providing the RNA further comprises at least one pesticidal agent selected from the group consisting of a patatin, a plant lectin, a phytoecdysteroid, a Bacillus thuringiensis insecticidal protein, a Xenorhabdus insecticidal protein, a Photorhabdus insecticidal protein, a Bacillus laterosporus insecticidal protein, and a Bacillus sphaericus insecticidal protein. In some embodiments, the diet providing the RNA includes at least one implantable formulation selected from the group consisting of a particulate, pellet, or capsule implanted in the plant; in such embodiments the method comprises implanting in the plant the implantable formulation. In some embodiments, the diet providing the RNA includes at least one in-furrow formulation selected from the group consisting of a powder, granule, pellet, capsule, spray, or drench, or any other forms suited for applying to a furrow; in such embodiments, the method includes an in-furrow treatment with the in-furrow formulation. In some embodiments, the method comprises treatment of a solanaceous plant seed, potato tuber, or piece of potato tuber with the agent.

[0058] It is anticipated that the combination of certain RNAs of use in this method (e.g., the dsRNA triggers described in the working Examples) with one or more non-polynucleotide pesticidal agents will result in an enhanced improvement in prevention or control of Lepidopteran pest infestations, when compared to the effect obtained with the RNA alone or the non-polynucleotide pesticidal agent alone. In an embodiment, a composition containing one or more RNAs and one or more non-polynucleotide pesticidal agent selected from the group consisting of a patatin, a plant lectin, a phytoecdysteroid, a Bacillus thuringiensis insecticidal protein, a Xenorhabdus insecticidal protein, a Photorhabdus insecticidal protein, a Bacillus laterosporus insecticidal protein, and a Bacillus sphaericus insecticidal protein, is found to effect improved prevention or control of Lepidopteran pest infestations.

[0059] The RNA of use in this method can be single-stranded (ss) or double-stranded (ds). Embodiments of the method include those wherein the RNA is at least one selected from the group consisting of sense single-stranded RNA (ssRNA), anti-sense single-stranded (ssRNA), or double-stranded RNA (dsRNA); a mixture of RNAs of any of these types can be used. In one embodiment a double-stranded DNA/RNA hybrid is used. The RNA can include components other than standard ribonucleotides, e.g., an embodiment is an RNA that comprises terminal deoxyribonucleotides.

[0060] The RNA comprises at least one silencing element, wherein the silencing element is essentially identical (as the RNA equivalent) or essentially complementary to a fragment of a target gene of the Lepidopteran pest larvae, wherein the target gene sequence is selected from the Target Gene Sequences Group. In some embodiments, the silencing element has a sequence of at least about 95%, about 96%, about 97%, about 98%, about 99%, or about 100% identity with or complementarity to a fragment of equivalent length of a DNA having a sequence selected from the Target Gene Sequences Group. In some embodiments the silencing element is exactly (100%) identical or exactly (100%) complementary (as the RNA equivalent) to a fragment of equivalent length of a DNA having a sequence selected from the Target Gene Sequences Group, the Trigger Sequences Group, or the DNA complement of any thereof. In some embodiments, the RNA containing the silencing element(s) has an overall sequence of about 95%, about 96%, about 97%, about 98%, about 99%, or about 100% identity with or complementarity to the fragment of a DNA having a sequence selected from the Target Gene Sequences Group.

[0061] In some embodiments, the silencing element comprises at least one segment of 18 or more contiguous nucleotides with a sequence of about 95% to about 100% identity with or complementarity to a fragment of equivalent length of the target gene. In some embodiments the silencing element comprises at least one segment of 18 or more contiguous nucleotides with a sequence of about 95% to about 100% identity with or complementarity to a fragment of equivalent length of a DNA having a sequence selected from the Target Gene Sequences Group, or the Trigger Sequences Group, or a DNA complement of any thereof. In some embodiments the silencing element comprises at least one segment of 18 or more contiguous nucleotides, e.g., between 18-24, or between 18-28, or between 20-30, or between 20-50, or between 20-100, or between 50-100, or between 50-500, or between 100-250, or between 100-500, or between 200-1000, or between 500-2000, or even greater. In some embodiments the silencing element comprises more than 18 contiguous nucleotides, e.g., 19, 20, 21, 22, 23, 24, 25, 26, 27, 28, 29, 30, or greater than 30, e.g., at least about 35, at least about 40, at least about 45, at least about 50, at least about 55, at least about 60, at least about 65, at least about 70, at least about 75, at least about 80, at least about 85, at least about 90, at least about 95, at least about 100, at least about 110, at least about 120, at least about 130, at least about 140, at least about 150, at least about 160, at least about 170, at least about 180, at least about 190, at least about 200, at least about 210, at least about 220, at least about 230, at least about 240, at least about 250, at least about 260, at least about 270, at least about 280, at least about 290, at least about 300, at least about 350, at least about 400, at least about 450, at least about 500, or greater than 500 contiguous nucleotides. In particular embodiments, the silencing element comprises at least one segment of at least 18, 19, 20, or 21 contiguous nucleotides with a sequence of 100% identity with a fragment of equivalent length of a DNA or target gene having a sequence selected from the Target Gene Sequences Group, the Trigger Sequences Group, or the DNA complement of any thereof. In particular embodiments, the RNA is a double-stranded nucleic acid (e.g., dsRNA) with one strand comprising at least one segment of at least 18, 19, 20, or 21 contiguous nucleotides with a sequence of 100% identity with a fragment of equivalent length of a DNA or target gene having a sequence selected from the Target Gene Sequences Group, the Trigger Sequences Group, or the DNA complement of any thereof; expressed as base-pairs, such a double-stranded nucleic acid comprises at least one segment of at least 18, 19, 20, or 21 contiguous, perfectly matched base-pairs which correspond to a fragment of equivalent length of a DNA or target gene having a sequence selected from the Target Gene Sequences Group, the Trigger Sequences Group, or the DNA complement of any thereof. In particular embodiments, each silencing element contained in the RNA is of a length greater than that which is typical of naturally occurring regulatory small RNAs, e.g., each segment is at least about 30 contiguous nucleotides (or base-pairs) in length. In some embodiments, the total length of the RNA, or the length of each silencing element contained in the RNA, is less than the total length of the sequence of interest (DNA or target gene having a sequence selected from the Target Gene Sequences Group or Trigger Sequences Group). In some embodiments, the total length of the RNA is between about 50 to about 500 nucleotides (for single-stranded polynucleotides) or base-pairs (for double-stranded polynucleotides). In some embodiments, the RNA is a dsRNA of between about 100 to about 500 base-pairs, such as a dsRNA of the length of any of the dsRNA triggers disclosed in Tables 1A, 1B and 1C. Embodiments include those in which the RNA is a dsRNA comprising a segment having a sequence selected from the group consisting of: SEQ ID NO: 115, 116, 119, 121, 123, 127, 135, 140, 141, 143, 150, 151, 153, 158, 161, 201, 209, 213, 217, 434, 442, 451, 452, 453, 454, 456, 457, 461, 474, 476, 479, 489, 491, 492, 521, 522, 523, 524, 527, 528, 536, 538, 539, 823, 826, 827, 828, 830, 832, 833, 834, 840, 841, 842, 844, 845, 851, 853, 854, 862, 874, 877, 883, 892, 893, 901, 946, 947, 953, 998, 1011, 1012, 1017, 1018, 1019, 1021, 1022, 1023, 1024, 1030, 1038, 1041, 1042, 1044, 1047, 1089, 1090, 1091, 1095, 1096, 1098, 1099, 1102, 1103, 1334, 1335, 1336, 1341, 1343, 1346, 1351, 1353, 1354, 1362, 1363, 1377, 1386, 1387, 1393, 1396, 1417, 1420, 1422, 1425, 1426, 1446, 1447, 1470, 1473, 1481, 1493, 1494, 1495, 1500, 1505, 1509, 1513, 1520, 1538, 1540, 1546, 1548, 1550, 1624, 1625, 1629, 1682, or 1683, or a combination thereof. In another embodiment, the agent comprises a polynucleotide or RNA encoded by a sequence selected from the group consisting of SEQ ID NOs: 434, 442, 451, 452, 453, 454, 456, 457, 461, 474, 476, 479, 489, 491, 492, 521, 522, 523, 524, 527, 528, 536, 538 and 539, or a combination thereof.

[0062] The RNA of use in this method is generally designed to suppress one or more genes (“target genes”). In some embodiments, the target genes can include coding or non-coding sequence or both. In other embodiments, the target gene has a sequence identical to or complementary to a messenger RNA, e.g., in some embodiments the target gene is a cDNA. In specific embodiments, the RNA is designed to suppress one or more target genes, where each target gene has a DNA sequence selected from the Target Gene Sequences Group or the Trigger Sequences Group. In various embodiments, the RNA is designed to suppress one or more genes, where each gene has a sequence selected from the Target Gene Sequences Group or the Trigger Sequences Group, and can be designed to suppress multiple genes from this group, or to target different regions of one or more of these genes. In an embodiment, the RNA comprises multiple silencing elements each of which comprises at least one segment of 21 contiguous nucleotides with a sequence of 100% identity with or 100% complementarity to a fragment of equivalent length of a DNA having a sequence selected from the Target Gene Sequences Group, the Trigger Sequences Group, or the DNA complement of any thereof. In such cases, each silencing element can be identical or different in size or in sequence, and can be sense or anti-sense relative to the target gene. For example, in one embodiment the RNA can include multiple silencing elements in tandem or repetitive arrangements, wherein each silencing element comprises at least one segment of 21 contiguous nucleotides with a sequence of 100% identity with or 100% complementarity to a fragment of equivalent length of a DNA having a sequence selected from the Target Gene Sequences Group or Trigger Sequences Group, or a DNA complement of any thereof; the segments can be from different regions of the target gene, e.g., the segments can correspond to different exon regions of the target gene, and “spacer” nucleotides which do not correspond to a target gene can optionally be used in between or adjacent to the segments.

[0063] The total length of the RNA can be greater than 18 contiguous nucleotides, and can include nucleotides in addition to the silencing element having a sequence of about 95% to about 100% identity with or complementarity to a fragment of equivalent length of a DNA or target gene having a sequence selected from the Target Gene Sequences Group, the Trigger Sequences Group, or the DNA complement of any thereof. In other words, the total length of the RNA can be greater than the length of the silencing element designed to suppress one or more target genes, where each target gene has a DNA sequence selected from the group consisting of the Target Gene Sequences Group. For example, the RNA can have nucleotides flanking the “active” silencing element of at least one segment of 18 or more contiguous nucleotides that suppresses the target gene, or include “spacer” nucleotides between active silencing elements, or can have additional nucleotides at the 5′ end, or at the 3′ end, or at both the 5′ and 3′ ends. In an embodiment, the RNA comprises additional nucleotides that are not specifically related (having a sequence not complementary or identical to) to the DNA or target gene having a sequence selected from the Target Gene Sequences Group, the Trigger Sequences Group, or the DNA complement of any thereof, e.g., nucleotides that provide stabilizing secondary structure or for convenience in cloning or manufacturing. In an embodiment, the RNA comprises additional nucleotides located immediately adjacent to one or more silencing element of 18 or more contiguous nucleotides with a sequence of about 95% to about 100% identity with or complementarity to a fragment of equivalent length of a DNA or target gene having a sequence selected from the Target Gene Sequences Group, the Trigger Sequences Group, or the DNA complement of any thereof. In an embodiment, the RNA comprises one such silencing element, with an additional 5′ G or an additional 3′ C or both, adjacent to the silencing element. In another embodiment, the RNA is a double-stranded RNA comprising additional nucleotides to form an overhang, for example, a dsRNA comprising 2 deoxyribonucleotides to form a 3′ overhang. Thus in various embodiments, the nucleotide sequence of the entire RNA is not 100% identical or complementary to a fragment of contiguous nucleotides in the DNA or target gene having a sequence selected from the Target Gene Sequences Group, the Trigger Sequences Group, or the DNA complement of any thereof. For example, in some embodiments the RNA comprises at least two silencing elements each of 21 contiguous nucleotides with a sequence of 100% identity with a fragment of a DNA having a sequence selected from the Target Gene Sequences Group, the Trigger Sequences Group, or the DNA complement of any thereof, wherein (1) the at least two silencing elements are separated by one or more spacer nucleotides, or (2) the at least two silencing elements are arranged in an order different from that in which the corresponding fragments occur in the DNA having a sequence selected from the Target Gene Sequences Group, the Trigger Sequences Group, or the DNA complement of any thereof.

[0064] In some embodiments the RNA consists of naturally occurring ribonucleotides. In certain embodiments, the RNA comprises components other than ribonucleotides, for example, synthetic RNAs consisting mainly of ribonucleotides but with one or more terminal deoxyribonucleotides or one or more terminal dideoxyribonucleotides. In certain embodiments, the RNA comprises non-canonical nucleotides such as inosine, thiouridine, or pseudouridine. In certain embodiments, the RNA comprises chemically modified nucleotides.

[0065] The RNA of use in this method is provided by suitable means known to one in the art. Embodiments include those wherein the RNA is chemically or enzymatically synthesized (e.g., by in vitro transcription, such as transcription using a T7 polymerase or other polymerase), produced by expression in a microorganism or in cell culture (such as plant or insect cells grown in culture), produced by expression in a plant cell, or produced by microbial fermentation.

[0066] In some embodiments the RNA is provided as an isolated RNA that is not part of an expression construct and is lacking additional elements such as a promoter or terminator sequences. Such RNAs can be relatively short, such as single- or double-stranded RNAs of between about 18 to about 300 or between about 50 to about 500 nucleotides (for single-stranded RNAs) or between about 18 to about 300 or between about 50 to about 500 base-pairs (for double-stranded RNAs). Alternatively the RNA can be provided in more complex constructs, e.g., as part of a recombinant expression construct, or included in a recombinant vector, for example in a recombinant plant virus vector or in a recombinant baculovirus vector. In some embodiments such recombinant expression constructs or vectors are designed to include additional elements, such as including additional RNA encoding an aptamer or ribozyme or an expression cassette for expressing a gene of interest (e.g., an insecticidal protein).

### V. Methods of Providing Plants Having Improved Resistance to Lepidopteran Infestations, and the Plants, Plant Parts, and Seeds Thus Provided

[0067] Several embodiments relate to a method of providing a plant having improved resistance to a Lepidopteran pest infestation comprising providing to the plant at least one polynucleotide comprising at least one segment of 18 or more contiguous nucleotides that is essentially identical or complementary to a fragment of a target gene selected from the group consisting of the genes identified in the Target Gene Sequences Group. In an embodiment, this invention provides a method of providing a plant having improved resistance to a Lepidopteran pest infestation comprising providing to the plant at least one polynucleotide comprising at least one segment that is identical or complementary to at least 18 contiguous nucleotides of a target gene or an RNA transcribed from the target gene, wherein the target gene is selected from the genes identified in the Target Gene Sequences Group or an RNA transcribed from the target gene. Embodiments of sequences that target genes are identified by SEQ ID NO in Tables 1A, 1B and 1C and include sequences that target genes having a sequence selected from the group consisting of the Target Gene Sequences Group, as well as related genes, including orthologues from related insect pest, for example related genes from other Lepidopteran pests. In some embodiments, the polynucleotide (e.g., double-stranded RNA) is chemically or enzymatically synthesized or is produced by expression in a microorganism or by expression in a plant cell. In some embodiments the polynucleotide comprises at least one segment of 18 or more contiguous nucleotides that is essentially identical or complementary to a sequence selected from the Target Gene Sequences Group, the Trigger Sequences Group, or the DNA complement of any thereof. In some embodiments the polynucleotide is a dsRNA with a strand having a sequence selected from the Trigger Sequences Group, or the complement thereof. In some embodiments the polynucleotide comprises a dsRNA with a strand having a sequence selected from the Trigger Sequences Group.

[0068] In a related aspect, this invention is directed to the plant having improved resistance to a Lepidopteran pest infestation, provided by expressing in the plant at least one polynucleotide comprising at least one segment of 18 or more contiguous nucleotides that are essentially identical or complementary to a fragment of equivalent length of a target gene selected from the group consisting of the genes identified in the Target Gene Sequences Group, whereby the resulting plant has improved resistance to a Lepidopteran pest infestation when compared to a control plant in which the polynucleotide is not expressed. In a related aspect, this invention is directed to the plant having improved resistance to a Lepidopteran pest infestation, provided by expressing in the plant at least one polynucleotide comprising at least one segment of 18 or more contiguous nucleotides with a sequence of about 95% to about 100% identity with or complementarity to a fragment of a target gene selected from the group consisting of the genes identified in the Target Gene Sequences Group, whereby the resulting plant has improved resistance to a Lepidopteran pest infestation when compared to a control plant in which the polynucleotide is not expressed.

[0069] In yet another aspect, this invention is directed to seed or propagatable parts (especially transgenic progeny seed or propagatable parts) produced by the plant having improved resistance to a Lepidopteran pest infestation, as provided by this method. Also contemplated is a commodity product produced by the plant having improved resistance to a Lepidopteran pest infestation, as provided by this method, and a commodity product produced from the transgenic progeny seed or propagatable parts of such a plant.

[0070] Another aspect of this invention provides a method of providing a plant having improved resistance to a Lepidopteran pest infestation comprising topically applying to the plant a composition comprising at least one polynucleotide having at least one segment of 18 or more contiguous nucleotides with a sequence of about 95% to about 100% identity with a fragment of a target gene or DNA having a sequence selected from The Target Gene Sequences Group, the Trigger Sequences Group, or the DNA complement of any thereof, in a manner such that the plant treated with the polynucleotide-containing composition exhibits improved resistance to a Lepidopteran pest infestation, relative to an untreated plant. In an embodiment, the at least one polynucleotide comprises at least one segment of 18 or more contiguous nucleotides that are essentially identical to a fragment of equivalent length of a DNA having a sequence selected from the Target Gene Sequences Group, the Trigger Sequences Group, or the DNA complement of any thereof. The polynucleotide can be longer than the segment or segments it contains, but each segment and corresponding fragment of a target gene are of equivalent length. In an embodiment, this invention provides a method of providing a plant having improved resistance to a Lepidopteran pest infestation comprising topically applying to the plant a composition comprising at least one polynucleotide comprising a nucleotide sequence that is complementary to at least 18 contiguous nucleotides of a target gene having a nucleotide sequence selected from the group consisting of: SEQ ID NOs: 2, 5, 7, 9, 13, 21, 26, 27, 29, 36, 37, 39, 44, 47, 87, 95, 99, 103, 301, 309, 318, 319, 320, 321, 323, 324, 328, 341, 343, 346, 356, 358, 359, 503, 504, 505, 506, 509, 510, 530, 532, 533, 542, 545, 546, 547, 549, 551, 552, 553, 559, 560, 561, 563, 564, 570, 572, 573, 581, 593, 596, 602, 611, 612, 620, 665, 666, 672, 717, 730, 731, 736, 737, 738, 740, 741, 742, 743, 749, 757, 760, 761, 763, 766, 808, 809, 810, 814, 815, 817, 818, 821, 822, 1104, 1105, 1106, 1111, 1113, 1116, 1121, 1123, 1124, 1132, 1133, 1147, 1156, 1157, 1163, 1166, 1187, 1190, 1192, 1195, 1196, 1216, 1217, 1240, 1243, 1251, 1263, 1264, 1265, 1270, 1275, 1279, 1283, 1290, 1308, 1310, 1316, 1318, 1320, 1564, 1565, 1569, 1622, and 1623, or an RNA transcribed from the target gene. In an embodiment, this invention provides a method of providing a plant having improved resistance to a Lepidopteran pest infestation comprising topically applying to the plant a composition comprising at least one polynucleotide in a manner such that an effective amount of the polynucleotide is ingested by Lepidopteran pest feeding on the plant, the polynucleotide comprising at least 18 contiguous nucleotides that are complementary to a target gene having a nucleotide sequence selected from the group consisting of: SEQ ID NOs: 2, 5, 7, 9, 13, 21, 26, 27, 29, 36, 37, 39, 44, 47, 87, 95, 99, 103, 301, 309, 318, 319, 320, 321, 323, 324, 328, 341, 343, 346, 356, 358, 359, 503, 504, 505, 506, 509, 510, 530, 532, 533, 542, 545, 546, 547, 549, 551, 552, 553, 559, 560, 561, 563, 564, 570, 572, 573, 581, 593, 596, 602, 611, 612, 620, 665, 666, 672, 717, 730, 731, 736, 737, 738, 740, 741, 742, 743, 749, 757, 760, 761, 763, 766, 808, 809, 810, 814, 815, 817, 818, 821, 822, 1104, 1105, 1106, 1111, 1113, 1116, 1121, 1123, 1124, 1132, 1133, 1147, 1156, 1157, 1163, 1166, 1187, 1190, 1192, 1195, 1196, 1216, 1217, 1240, 1243, 1251, 1263, 1264, 1265, 1270, 1275, 1279, 1283, 1290, 1308, 1310, 1316, 1318, 1320, 1564, 1565, 1569, 1622, and 1623, or an RNA transcribed from the target gene.

[0071] Polynucleotides of use in the method can be designed for multiple target genes. Embodiments include those in which the composition comprises a dsRNA with a strand having a sequence selected from the group consisting of the Trigger Sequences Group. Related aspects of the invention include compositions for topical application and isolated polynucleotides of use in the method, and plants having improved Lepidopteran resistance provided by the method.

[0072] By “topical application” as used throughout herein is meant application to the surface or exterior of an object, such as the surface or exterior of a plant, such as application to the surfaces of a plant part such as a leaf, stem, flower, fruit, shoot, root, seed, tuber, flowers, anthers, or pollen, or application to an entire plant, or to the above-ground or below-ground portions of a plant. Topical application can be carried out on non-living surfaces, such as application to soil, or to a surface or matrix by which a Lepidopteran pest can come in contact with the polynucleotide. In various embodiments of the method, the composition comprising at least one polynucleotide is topically applied to the plant in a suitable form, e.g., as a solid, liquid (including homogeneous mixtures such as solutions and non-homogeneous mixtures such as suspensions, colloids, micelles, and emulsions), powder, suspension, emulsion, spray, encapsulated or micro-encapsulation formulation, in or on microbeads or other carrier particulates, in a film or coating, or on or within a matrix, or as a seed treatment. In some embodiments of the method, the polynucleotide-containing composition is topically applied to above-ground parts of the plant, e.g., sprayed or dusted onto leaves, stems, and flowering parts of the plant.

[0073] Embodiments of the method include topical application of a foliar spray (e.g., spraying a liquid polynucleotide-containing composition on leaves of a solanaceous plant) or a foliar dust (e.g., dusting a crop plant with a polynucleotide-containing composition in the form of a powder or on carrier particulates). In other embodiments, the polynucleotide-containing composition is topically applied to below-ground parts of the plant, such as to the roots, e.g., by means of a soil drench. In other embodiments, the polynucleotide-containing composition is topically applied to a seed that is grown into the plant. The topical application can be in the form of topical treatment of fruits of crop plants or seeds from fruits of crop plants, or in the form of topical treatment of “seed potato” tubers or pieces of tuber (e.g., by soaking, coating, or dusting the seed potato). Suitable binders, inert carriers, surfactants, and the like can optionally be included in the polynucleotide-containing composition, as is known to one skilled in formulation of pesticides and seed treatments.

[0074] In some embodiments, the polynucleotide-containing composition is at least one topically implantable formulation selected from the group consisting of a particulate, pellet, or capsule topically implanted in the plant; in such embodiments the method comprises topically implanting in the plant the topically implantable formulation. In some embodiments, the polynucleotide-containing composition is at least one in-furrow formulation selected from the group consisting of a powder, granule, pellet, capsule, spray, or drench, or any other forms suited for topically applying to a furrow; in such embodiments, the method includes an in-furrow treatment with the in-furrow formulation. In one embodiment the polynucleotide-containing composition can be ingested or otherwise absorbed internally by the Lepidopteran pest. For example, the polynucleotide-containing composition can be in the form of bait. In some embodiments, the polynucleotide-containing composition further comprises one or more components selected from the group consisting of a carrier agent, a surfactant, a cationic lipid (such as that disclosed in Example 18 of U.S. patent application publication 2011/0296556, incorporated by reference herein), an organosilicone, an organosilicone surfactant, a polynucleotide herbicidal molecule, a non-polynucleotide herbicidal molecule, a non-polynucleotide pesticide, a safener, and an insect growth regulator. In one embodiment the composition further comprises a nonionic organosilicone surfactant such as SILWET® brand surfactants, e.g., SILWET L-77® brand surfactant having CAS Number 27306-78-1 and EPA Number: CAL.REG.NO. 5905-50073-AA, currently available from Momentive Performance Materials, Albany, N.Y. In some embodiments, the topically applied composition further comprises at least one pesticidal agent selected from the group consisting of a patatin, a plant lectin, a phytoecdysteroid, a Bacillus thuringiensis insecticidal protein, a Xenorhabdus insecticidal protein, a Photorhabdus insecticidal protein, a Bacillus laterosporus insecticidal protein, and a Bacillus sphaericus insecticidal protein. Alternatively such additional components or pesticidal agents can be provided separately, e.g., by separate topical application or by transgenic expression in the plant. Alternatively the plant is topically treated with the polynucleotide-containing composition as well as with a separate (preceding, following, or concurrent) application of a substance that improves the efficacy of the polynucleotide-containing composition. For example, a plant can be sprayed with a first topical application of a solution containing a nonionic organosilicone surfactant such as SILWET® brand surfactants, e.g., SILWET L-77® brand surfactant, followed by a second topical application of the polynucleotide-containing composition, or vice-versa.

[0075] It is anticipated that the combination of certain polynucleotides useful in the polynucleotide-containing composition (e.g., the polynucleotide triggers described in the working Examples) with one or more non-polynucleotide pesticidal agents will result in an enhanced improvement in prevention or control of Lepidopteran pest infestations, when compared to the effect obtained with the polynucleotide alone or the non-polynucleotide pesticidal agent alone. In an embodiment, the polynucleotide-containing composition is provided as a transgenic plant expressing one or more polynucleotides and one or more genes encoding a non-polynucleotide pesticidal agent selected from the group consisting of a patatin, a plant lectin, a phytoecdysteroid, a Bacillus thuringiensis insecticidal protein, a Xenorhabdus insecticidal protein, a Photorhabdus insecticidal protein, a Bacillus laterosporus insecticidal protein, and a Bacillus sphaericus insecticidal protein, wherein the transgenic plant is found to exhibit improved resistance to Lepidopteran pest infestations.

[0076] The polynucleotide useful in the polynucleotide-containing composition is provided by suitable means known to one in the art. Embodiments include those wherein the polynucleotide is chemically or enzymatically synthesized (e.g., by in vitro transcription, such as transcription using a T7 polymerase or other polymerase), produced by expression in a microorganism or in cell culture (such as plant or insect cells grown in culture), produced by expression in a plant cell, or produced by microbial fermentation.

[0077] In many embodiments the polynucleotide useful in the polynucleotide-containing composition is provided as an isolated DNA or RNA fragment. In some embodiments the polynucleotide useful in the polynucleotide-containing composition is not part of an expression construct and is lacking additional elements such as a promoter or terminator sequences). Such polynucleotides can be relatively short, such as single- or double-stranded polynucleotides of between about 18 to about 300 or between about 50 to about 500 nucleotides (for single-stranded polynucleotides) or between about 18 to about 300 or between about 50 to about 500 base-pairs (for double-stranded polynucleotides). In some embodiments, the polynucleotide is a dsRNA of between about 100 to about 500 base-pairs, such as a dsRNA of the length of any of the dsRNA triggers disclosed in Tables 1A, 1B and 1C. Alternatively the polynucleotide can be provided in more complex constructs, e.g., as part of a recombinant expression construct, or included in a recombinant vector, for example in a recombinant plant virus vector or in a recombinant baculovirus vector. Such recombinant expression constructs or vectors can be designed to include additional elements, such as expression cassettes for expressing a gene of interest (e.g., an insecticidal protein).

[0078] The polynucleotide useful in the polynucleotide-containing composition has at least one segment of 18 or more contiguous nucleotides with a sequence of about 95% to about 100% identity with a fragment of equivalent length of a DNA having a sequence selected from the Target Gene Sequences Group, the Trigger Sequences Group, or the DNA complement of any thereof. In an embodiment the polynucleotide comprises at least one segment of 18 or more contiguous nucleotides that are essentially identical or complementary to a fragment of equivalent length of a DNA having a sequence selected from Target Gene Sequences Group or the Trigger Sequences Group. In some embodiments, the contiguous nucleotides have a sequence of about 95%, about 96%, about 97%, about 98%, about 99%, or about 100% identity with a fragment of a DNA having a sequence selected from the Target Gene Sequences Group, the Trigger Sequences Group, or the DNA complement of any thereof. In some embodiments the contiguous nucleotides are exactly (100%) identical to a fragment of equivalent length of a DNA having a sequence selected from the Target Gene Sequences Group, the Trigger Sequences Group, or the DNA complement of any thereof. In some embodiments, the polynucleotide has an overall sequence of about 95%, about 96%, about 97%, about 98%, about 99%, or about 100% identity with a fragment of a DNA having a sequence selected from the Target Gene Sequences Group, the Trigger Sequences Group, or the DNA complement thereof.

[0079] The polynucleotide useful in the polynucleotide-containing composition comprises at least one segment of 18 or more contiguous nucleotides, e.g., between 18-24, or between 18-28, or between 20-30, or between 20-50, or between 20-100, or between 50-100, or between 50-500, or between 100-250, or between 100-500, or between 200-1000, or between 500-2000, or even greater. In some embodiments the segment comprises more than 18 contiguous nucleotides, e.g., 19, 20, 21, 22, 23, 24, 25, 26, 27, 28, 29, 30, or greater than 30, e.g., at least about 35, at least about 40, at least about 45, at least about 50, at least about 55, at least about 60, at least about 65, at least about 70, at least about 75, at least about 80, at least about 85, at least about 90, at least about 95, at least about 100, at least about 110, at least about 120, at least about 130, at least about 140, at least about 150, at least about 160, at least about 170, at least about 180, at least about 190, at least about 200, at least about 210, at least about 220, at least about 230, at least about 240, at least about 250, at least about 260, at least about 270, at least about 280, at least about 290, at least about 300, at least about 350, at least about 400, at least about 450, at least about 500, or greater than 500 contiguous nucleotides. In particular embodiments, the polynucleotide comprises at least one segment of at least 18, 19, 20, or 21 contiguous nucleotides with a sequence of 100% identity with a fragment of equivalent length of a DNA or target gene having a sequence selected from the Target Gene Sequences Group, the Trigger Sequences Group, or the DNA complement thereof. In particular embodiments, the polynucleotide is a double-stranded nucleic acid (e.g., dsRNA) with one strand comprising at least one segment of at least 18, 19, 20, or 21 contiguous nucleotides with a sequence of 100% identity with a fragment of equivalent length of a DNA or target gene having a sequence selected from the Target Gene Sequences Group, the Trigger Sequences Group, or the DNA complement of any thereof expressed as base-pairs, such a double-stranded nucleic acid comprises at least one segment of at least 18, 19, 20, or 21 contiguous, perfectly matched base-pairs which correspond to a fragment of equivalent length of a DNA or target gene having a sequence selected from the Target Gene Sequences Group, the Trigger Sequences Group, or the DNA complement of any thereof. In particular embodiments, each segment contained in the polynucleotide is of a length greater than that which is typical of naturally occurring regulatory small RNAs, e.g., each segment is at least about 30 contiguous nucleotides (or base-pairs) in length. In some embodiments, the total length of the polynucleotide, or the length of each segment contained in the polynucleotide, is less than the total length of the sequence of interest (DNA or target gene having a sequence selected from the group consisting of the Target Gene Sequences Group). In some embodiments, the total length of the polynucleotide is between about 50 to about 500 nucleotides (for single-stranded polynucleotides) or base-pairs (for double-stranded polynucleotides). In some embodiments, the polynucleotide is a dsRNA of between about 100 to about 500 base-pairs, such as a dsRNA of the length of any of the dsRNA triggers disclosed in Tables 1A, 1B and 1C. In some embodiments, the polynucleotide is dsRNA encoded by a sequence selected from the group consisting of SEQ ID NO: 115, 116, 119, 121, 123, 127, 135, 140, 141, 143, 150, 151, 153, 158, 161, 201, 209, 213, 217, 434, 442, 451, 452, 453, 454, 456, 457, 461, 474, 476, 479, 489, 491, 492, 521, 522, 523, 524, 527, 528, 536, 538, 539, 823, 826, 827, 828, 830, 832, 833, 834, 840, 841, 842, 844, 845, 851, 853, 854, 862, 874, 877, 883, 892, 893, 901, 946, 947, 953, 998, 1011, 1012, 1017, 1018, 1019, 1021, 1022, 1023, 1024, 1030, 1038, 1041, 1042, 1044, 1047, 1089, 1090, 1091, 1095, 1096, 1098, 1099, 1102, 1103, 1334, 1335, 1336, 1341, 1343, 1346, 1351, 1353, 1354, 1362, 1363, 1377, 1386, 1387, 1393, 1396, 1417, 1420, 1422, 1425, 1426, 1446, 1447, 1470, 1473, 1481, 1493, 1494, 1495, 1500, 1505, 1509, 1513, 1520, 1538, 1540, 1546, 1548, 1550, 1624, 1625, 1629, 1682, or 1683, or a combination thereof. In another embodiment, the agent comprises a polynucleotide or RNA encoded by a sequence selected from the group consisting of SEQ ID NOs: 434, 442, 451, 452, 453, 454, 456, 457, 461, 474, 476, 479, 489, 491, 492, 521, 522, 523, 524, 527, 528, 536, 538 and 539, or a combination thereof.

[0080] The topically applied polynucleotide is generally designed to suppress one or more genes (“target genes”). Such target genes can include coding or non-coding sequence or both. In specific embodiments, the polynucleotide is designed to suppress one or more target genes, where each target gene has a DNA sequence selected from the group consisting of the Target Gene Sequences Group. In various embodiments, the topically applied polynucleotide is designed to suppress one or more genes, where each gene has a sequence selected from the group consisting of the Target Gene Sequences Group, and can be designed to suppress multiple genes from this group, or to target different regions of one or more of these genes. In an embodiment, the topically applied polynucleotide comprises multiple sections or segments each of which comprises at least one segment of 21 contiguous nucleotides with a sequence of 100% identity with a fragment of equivalent length of a DNA having a sequence selected from the Target Gene Sequences Group, the Trigger Sequences Group, or the DNA complement of any thereof. In such cases, each section can be identical or different in size or in sequence, and can be sense or anti-sense relative to the target gene. For example, in one embodiment the topically applied polynucleotide can include multiple sections in tandem or repetitive arrangements, wherein each section comprises at least one segment of 21 contiguous nucleotides with a sequence of 100% identity with a fragment of equivalent length of a DNA having a sequence selected from the Target Gene Sequences Group.

[0081] The total length of the topically applied polynucleotide can be greater than 18 contiguous nucleotides, and can include nucleotides in addition to the contiguous nucleotides having the sequence of about 95% to about 100% identity with a fragment of equivalent length of a DNA having a sequence selected from the Target Gene Sequences Group, the Trigger Sequences Group, or the DNA complement of any thereof. In other words, the total length of the topically applied polynucleotide can be greater than the length of the section or segment of the polynucleotide designed to suppress one or more target genes, where each target gene has a DNA sequence selected from the group consisting of the Target Gene Sequences Group. For example, the topically applied polynucleotide can have nucleotides flanking the “active” segment of at least one segment of 18 or more contiguous nucleotides that suppresses the target gene, or include “spacer” nucleotides between active segments, or can have additional nucleotides at the 5′ end, or at the 3′ end, or at both the 5′ and 3′ ends. In an embodiment, the topically applied polynucleotide comprises additional nucleotides that are not specifically related (having a sequence not complementary or identical to) to the DNA or target gene having a sequence selected from the Target Gene Sequences Group, the Trigger Sequences Group, or the DNA complement of any thereof, e.g., nucleotides that provide stabilizing secondary structure or for convenience in cloning or manufacturing.

[0082] In an embodiment, the topically applied polynucleotide comprises additional nucleotides located immediately adjacent to one or more segment of 18 or more contiguous nucleotides with a sequence of about 95% to about 100% identity with or complementarity to a fragment of equivalent length of a DNA or target gene having a sequence selected from the group consisting of the Target Gene Sequences Group. In an embodiment, the topically applied polynucleotide comprises one such segment, with an additional 5′ G or an additional 3′ C or both, adjacent to the segment. In another embodiment, the topically applied polynucleotide is a double-stranded RNA comprising additional nucleotides to form an overhang, for example, a dsRNA comprising 2 deoxyribonucleotides to form a 3′ overhang. Thus, in various embodiments, the nucleotide sequence of the entire topically applied polynucleotide is not 100% identical or complementary to a fragment of contiguous nucleotides in the DNA or target gene having a sequence selected from the Target Gene Sequences Group, the Trigger Sequences Group, or the DNA complement of any thereof. For example, in some embodiments the topically applied polynucleotide comprises at least two segments each of 21 contiguous nucleotides with a sequence of 100% identity with a fragment of a DNA having a sequence selected from the Target Gene Sequences Group, the Trigger Sequences Group, or the DNA complement of any thereof, wherein (1) the at least two segments are separated by one or more spacer nucleotides, or (2) the at least two segments are arranged in an order different from that in which the corresponding fragments occur in the DNA having a sequence selected from the Target Gene Sequences Group, the Trigger Sequences Group, or the DNA complement of any thereof.

[0083] In a related aspect, this invention is directed to the plant having improved resistance to a Lepidopteran pest infestation, provided by this method which comprises topically applying to the plant a composition comprising at least one polynucleotide having at least one segment of 18 or more contiguous nucleotides with a sequence of about 95% to about 100% identity with a fragment of equivalent length of a DNA having a sequence selected from the Target Gene Sequences Group, the Trigger Sequences Group, or the DNA complement of any thereof, whereby the plant treated with the polynucleotide composition exhibits improved resistance to a Lepidopteran pest infestation, relative to an untreated plant.

[0084] An embodiment is a crop plant having improved resistance to a Lepidopteran pest infestation when compared to a control plant, provided by topically applying to the plant or to a seed grown into the plant (or, where the plant is a potato plant, to a seed potato grown into the potato plant) a dsRNA trigger having a sequence selected from the Trigger Sequences Group, or the complement thereof, or a dsRNA trigger encoded by a sequence selected from the group consisting of SEQ ID NO: 115, 116, 119, 121, 123, 127, 135, 140, 141, 143, 150, 151, 153, 158, 161, 201, 209, 213, 217, 434, 442, 451, 452, 453, 454, 456, 457, 461, 474, 476, 479, 489, 491, 492, 521, 522, 523, 524, 527, 528, 536, 538, 539, 823, 826, 827, 828, 830, 832, 833, 834, 840, 841, 842, 844, 845, 851, 853, 854, 862, 874, 877, 883, 892, 893, 901, 946, 947, 953, 998, 1011, 1012, 1017, 1018, 1019, 1021, 1022, 1023, 1024, 1030, 1038, 1041, 1042, 1044, 1047, 1089, 1090, 1091, 1095, 1096, 1098, 1099, 1102, 1103, 1334, 1335, 1336, 1341, 1343, 1346, 1351, 1353, 1354, 1362, 1363, 1377, 1386, 1387, 1393, 1396, 1417, 1420, 1422, 1425, 1426, 1446, 1447, 1470, 1473, 1481, 1493, 1494, 1495, 1500, 1505, 1509, 1513, 1520, 1538, 1540, 1546, 1548, 1550, 1624, 1625, 1629, 1682, or 1683, or a combination thereof. In another embodiment, the agent comprises a polynucleotide or RNA encoded by a sequence selected from the group consisting of SEQ ID NOs: 434, 442, 451, 452, 453, 454, 456, 457, 461, 474, 476, 479, 489, 491, 492, 521, 522, 523, 524, 527, 528, 536, 538 and 539, or a combination thereof. In yet another aspect, this invention is directed to seed (especially transgenic progeny seed) produced by the plant having improved resistance to a Lepidopteran pest infestation, as provided by this method. Also contemplated is a commodity product produced by the plant having improved resistance to a Lepidopteran pest infestation, as provided by this method, and a commodity product produced from the transgenic progeny seed of such a plant.

### VI. Insecticidal Compositions for Controlling Lepidopteran Pest

[0085] Another aspect of this invention provides an insecticidal composition for controlling a Lepidopteran pest comprising an insecticidally effective amount of at least one RNA comprising at least one segment of 18 or more contiguous nucleotides that is essentially identical or complementary to a fragment of a target gene or DNA having a sequence selected from the Target Gene Sequences Group, the Trigger Sequences Group, or the DNA complement of any thereof. In this context “controlling” includes inducement of a physiological or behavioural change in a Lepidopteran pest (adult or larvae) such as, but not limited to, growth stunting, increased mortality, decrease in reproductive capacity, decrease in or cessation of feeding behavior or movement, or decrease in or cessation of metamorphosis stage development. By “insecticidally effective” is meant effective in inducing a physiological or behavioural change in a Lepidopteran pest (adult or larvae) such as, but not limited to, growth stunting, increased mortality, decrease in reproductive capacity or decreased fecundity, decrease in or cessation of feeding behavior or movement, or decrease in or cessation of metamorphosis stage development; in some embodiments, application of an insecticidally effective amount of the RNA to a plant improves the plant's resistance to infestation by a Lepidopteran pest. The RNA can be longer than the segment or segments it contains, but each segment and corresponding fragment of a target gene are of equivalent length. RNAs of use in the method can be designed for multiple target genes. Embodiments include those in which the insecticidal composition comprises an insecticidally effective amount of a polynucleotide comprising at least 18, 19, 20, or 21 contiguous nucleotides that are complementary to a target gene having a nucleotide sequence selected from the Target Genes Sequences Group, or an RNA transcribed from the target gene; or an insecticidally effective amount of at least one polynucleotide comprising at least one silencing element that is complementary to at least 21 contiguous nucleotides of a target gene or an RNA transcribed from the target gene, wherein the target gene has a nucleotide sequence selected from the Target Gene Sequences Group; or an insecticidally effective amount of at least one RNA comprising at least one segment that is identical or complementary to at least 18, 19, 20, or 21 contiguous nucleotides of a target gene having a nucleotide sequence selected from the group consisting of: SEQ ID NOs: 2, 5, 7, 9, 13, 21, 26, 27, 29, 36, 37, 39, 44, 47, 87, 95, 99, 103, 301, 309, 318, 319, 320, 321, 323, 324, 328, 341, 343, 346, 356, 358, 359, 503, 504, 505, 506, 509, 510, 530, 532, 533, 542, 545, 546, 547, 549, 551, 552, 553, 559, 560, 561, 563, 564, 570, 572, 573, 581, 593, 596, 602, 611, 612, 620, 665, 666, 672, 717, 730, 731, 736, 737, 738, 740, 741, 742, 743, 749, 757, 760, 761, 763, 766, 808, 809, 810, 814, 815, 817, 818, 821, 822, 1104, 1105, 1106, 1111, 1113, 1116, 1121, 1123, 1124, 1132, 1133, 1147, 1156, 1157, 1163, 1166, 1187, 1190, 1192, 1195, 1196, 1216, 1217, 1240, 1243, 1251, 1263, 1264, 1265, 1270, 1275, 1279, 1283, 1290, 1308, 1310, 1316, 1318, 1320, 1564, 1565, 1569, 1622, and 1623, or an RNA transcribed from the target gene; or an RNA molecule that causes mortality or stunting of growth in a Lepidopteran pest when ingested or contacted by the Lepidopteran pest, wherein the RNA molecule comprises at least 18, 19, 20, or 21 contiguous nucleotides that are complementary to a target gene having a nucleotide sequence selected from the group consisting of: SEQ ID NOs: 2, 5, 7, 9, 13, 21, 26, 27, 29, 36, 37, 39, 44, 47, 87, 95, 99, 103, 301, 309, 318, 319, 320, 321, 323, 324, 328, 341, 343, 346, 356, 358, 359, 503, 504, 505, 506, 509, 510, 530, 532, 533, 542, 545, 546, 547, 549, 551, 552, 553, 559, 560, 561, 563, 564, 570, 572, 573, 581, 593, 596, 602, 611, 612, 620, 665, 666, 672, 717, 730, 731, 736, 737, 738, 740, 741, 742, 743, 749, 757, 760, 761, 763, 766, 808, 809, 810, 814, 815, 817, 818, 821, 822, 1104, 1105, 1106, 1111, 1113, 1116, 1121, 1123, 1124, 1132, 1133, 1147, 1156, 1157, 1163, 1166, 1187, 1190, 1192, 1195, 1196, 1216, 1217, 1240, 1243, 1251, 1263, 1264, 1265, 1270, 1275, 1279, 1283, 1290, 1308, 1310, 1316, 1318, 1320, 1564, 1565, 1569, 1622, and 1623, or an RNA transcribed from the target gene; or an insecticidal double-stranded RNA molecule that causes mortality or stunting of growth in a Lepidopteran pest when ingested or contacted by the Lepidopteran pest, wherein at least one strand of the insecticidal double-stranded RNA molecule comprises 21 contiguous nucleotides that are complementary to a target gene or an RNA transcribed from the target gene, wherein the target gene has a sequence selected from the group consisting of: SEQ ID NOs:22, 5, 7, 9, 13, 21, 26, 27, 29, 36, 37, 39, 44, 47, 87, 95, 99, 103, 301, 309, 318, 319, 320, 321, 323, 324, 328, 341, 343, 346, 356, 358, 359, 503, 504, 505, 506, 509, 510, 530, 532, 533, 542, 545, 546, 547, 549, 551, 552, 553, 559, 560, 561, 563, 564, 570, 572, 573, 581, 593, 596, 602, 611, 612, 620, 665, 666, 672, 717, 730, 731, 736, 737, 738, 740, 741, 742, 743, 749, 757, 760, 761, 763, 766, 808, 809, 810, 814, 815, 817, 818, 821, 822, 1104, 1105, 1106, 1111, 1113, 1116, 1121, 1123, 1124, 1132, 1133, 1147, 1156, 1157, 1163, 1166, 1187, 1190, 1192, 1195, 1196, 1216, 1217, 1240, 1243, 1251, 1263, 1264, 1265, 1270, 1275, 1279, 1283, 1290, 1308, 1310, 1316, 1318, 1320, 1564, 1565, 1569, 1622, and 1623; or an insecticidally effective amount of at least one double-stranded RNA comprising a sequence selected from the Trigger Sequences Group. In some embodiments, the polynucleotide is a double-stranded RNA. In some embodiments, the polynucleotide (e.g., double-stranded RNA) is chemically or enzymatically synthesized or is produced by expression in a microorganism or by expression in a plant cell. Embodiments include insecticidal compositions comprising a dsRNA having a sequence selected from the Trigger Sequences Group, or in a more specific embodiment, selected from the group consisting of SEQ ID NO: 115, 116, 119, 121, 123, 127, 135, 140, 141, 143, 150, 151, 153, 158, 161, 201, 209, 213, 217, 434, 442, 451, 452, 453, 454, 456, 457, 461, 474, 476, 479, 489, 491, 492, 521, 522, 523, 524, 527, 528, 536, 538, 539, 823, 826, 827, 828, 830, 832, 833, 834, 840, 841, 842, 844, 845, 851, 853, 854, 862, 874, 877, 883, 892, 893, 901, 946, 947, 953, 998, 1011, 1012, 1017, 1018, 1019, 1021, 1022, 1023, 1024, 1030, 1038, 1041, 1042, 1044, 1047, 1089, 1090, 1091, 1095, 1096, 1098, 1099, 1102, 1103, 1334, 1335, 1336, 1341, 1343, 1346, 1351, 1353, 1354, 1362, 1363, 1377, 1386, 1387, 1393, 1396, 1417, 1420, 1422, 1425, 1426, 1446, 1447, 1470, 1473, 1481, 1493, 1494, 1495, 1500, 1505, 1509, 1513, 1520, 1538, 1540, 1546, 1548, 1550, 1624, 1625, 1629, 1682, or 1683, or a combination thereof, or the complement thereof.

[0086] In various embodiments, the insecticidal composition for controlling a Lepidopteran pest is in the form of at least one selected from the group consisting of a solid, liquid (including homogeneous mixtures such as solutions and non-homogeneous mixtures such as suspensions, colloids, micelles, and emulsions), powder, suspension, emulsion, spray, encapsulated or micro-encapsulation formulation, in or on microbeads or other carrier particulates, in a film or coating, or on or within a matrix, or as a seed treatment. Suitable binders, inert carriers, surfactants, and the like can optionally be included in the polynucleotide-containing composition, as is known to one skilled in formulation of insecticides and seed treatments. The Lepidopteran pest to be controlled is generally a pest that infests a plant. In some embodiments, the insecticidal composition is at least one implantable formulation selected from the group consisting of a particulate, pellet, or capsule implanted in the plant; in such embodiments the method comprises implanting in the plant the implantable formulation. In some embodiments, the insecticidal composition is at least one in-furrow formulation selected from the group consisting of a powder, granule, pellet, capsule, spray, or drench, or any other forms suited for applying to a furrow; in such embodiments, the method comprises an in-furrow treatment with the in-furrow formulation. In one embodiment the insecticidal composition can be ingested or otherwise absorbed internally by the Lepidopteran pest. For example, the insecticidal composition can be in the form of bait. In some embodiments, the insecticidal composition further comprises one or more components selected from the group consisting of a carrier agent, a surfactant, a cationic lipid (such as that disclosed in Example 18 of U.S. patent application publication 2011/0296556, incorporated by reference herein), an organosilicone, an organosilicone surfactant, a polynucleotide herbicidal molecule, a non-polynucleotide herbicidal molecule, a non-polynucleotide pesticide, a safener, and an insect growth regulator. In one embodiment the insecticidal composition further comprises a nonionic organosilicone surfactant such as SILWET® brand surfactants, e.g., SILWET L-77® brand surfactant having CAS Number 27306-78-1 and EPA Number: CAL.REG.NO. 5905-50073-AA, currently available from Momentive Performance Materials, Albany, N.Y. In some embodiments, the insecticidal composition further comprises at least one pesticidal agent selected from the group consisting of a patatin, a plant lectin, a phytoecdysteroid, a Bacillus thuringiensis insecticidal protein, a Xenorhabdus insecticidal protein, a Photorhabdus insecticidal protein, a Bacillus laterosporus insecticidal protein, and a Bacillus sphaericus insecticidal protein. Alternatively such additional components or pesticidal agents can be provided separately, e.g., by separate topical application or by transgenic expression in the plant. Alternatively the plant is topically treated with the insecticidal composition as well as with a separate (preceding, following, or concurrent) application of a substance that improves the efficacy of the insecticidal composition. For example, a plant can be sprayed with a first topical application of a solution containing a nonionic organosilicone surfactant such as SILWET® brand surfactants, e.g., SILWET L-77® brand surfactant, followed by a second topical application of the insecticidal composition, or vice-versa.

[0087] It is anticipated that the combination of certain RNAs of use in this method (e.g., the dsRNA triggers described in the working Examples) with one or more non-polynucleotide pesticidal agents will result in an enhanced improvement in prevention or control of Lepidopteran pest infestations, when compared to the effect obtained with the RNA alone or the non-polynucleotide pesticidal agent alone. In an embodiment, the insecticidal composition contains one or more RNAs and one or more non-polynucleotide pesticidal agent selected from the group consisting of a patatin, a plant lectin, a phytoecdysteroid, a Bacillus thuringiensis insecticidal protein, a Xenorhabdus insecticidal protein, a Photorhabdus insecticidal protein, a Bacillus laterosporus insecticidal protein, and a Bacillus sphaericus insecticidal protein, and is found to effect improved prevention or control of Lepidopteran pest infestations.

[0088] In various embodiments, the insecticidal composition comprises a microbial cell or is produced in a microorganism. For example, the insecticidal composition can include or can be produced in bacteria or yeast cells. In similar embodiments the insecticidal composition comprises a transgenic plant cell or is produced in a plant cell (for example a plant cell transiently expressing the polynucleotide); such plant cells can be cells in an plant or cells grown in tissue culture or in cell suspension.

[0089] The insecticidal composition can be provided for dietary uptake by the Lepidopteran pest by applying the composition to a plant or surface subject to infestation by the Lepidopteran pest, for example by spraying, dusting, or coating the plant or a seed of the plant or a seed potato, or by application of a soil drench or in-furrow treatment, or by providing in an artificial diet. The insecticidal composition can be provided for dietary uptake by the Lepidopteran pest in an artificial diet formulated to meet the particular nutritional requirements for maintaining the Lepidopteran pest, wherein the artificial diet is supplemented with some amount of the RNA obtained from a separate source such as chemical synthesis or purified from a microbial fermentation; this embodiment can be useful, e.g., for determining the timing and amounts of effective RNA treatment regimes. In some embodiments the insecticidal composition is provided for dietary uptake by the Lepidopteran pest in the form of a plant cell or in plant cell components, or in a microorganism (such as a bacterium or a yeast) or a microbial fermentation product, or in a synthetic diet. In one embodiment the insecticidal composition is provided in the form of bait that is ingested by the Lepidopteran pest. The insecticidal composition can be provided for dietary uptake by the Lepidopteran pest in the form of a seed (or seed potato) treatment.

[0090] In one embodiment the insecticidal composition is provided in the form of any plant that is subject to infestation by a Lepidopteran pest, wherein the RNA is contained in or on the plant. Such plants can be stably transgenic plants that express the RNA, or non-transgenic plants that transiently express the RNA or that have been treated with the RNA, e.g., by spraying or coating. Stably transgenic plants generally contain integrated into their genome a recombinant construct that encodes the RNA.

[0091] The RNA useful in the insecticidal composition can be single-stranded (ss) or double-stranded (ds). Embodiments include those wherein the RNA is at least one selected from the group consisting of sense single-stranded RNA (ssRNA), anti-sense single-stranded (ssRNA), or double-stranded RNA (dsRNA); a mixture of RNAs of any of these types can be used. In one embodiment a double-stranded DNA/RNA hybrid is used. The RNA can include components other than standard ribonucleotides, e.g., an embodiment is an RNA that comprises terminal deoxyribonucleotides.

[0092] The RNA in the insecticidal composition has at least one segment of 18 or more contiguous nucleotides with a sequence of about 95% to about 100% identity with a fragment of equivalent length of a target gene or DNA having a sequence selected from the Target Gene Sequences Group, the Trigger Sequences Group, or the DNA complement of any thereof. In an embodiment the RNA comprises at least one segment of 18 or more contiguous nucleotides that are essentially identical or complementary to a fragment of equivalent length of a DNA having a sequence selected from the Target Gene Sequences Group, the Trigger Sequences Group, or the DNA complement of any thereof. In some embodiments, the contiguous nucleotides have a sequence of about 95%, about 96%, about 97%, about 98%, about 99%, or about 100% identity with a fragment of a DNA having a sequence selected from the Target Gene Sequences Group, the Trigger Sequences Group, or the DNA complement of any thereof. In some embodiments the contiguous nucleotides are exactly (100%) identical to a fragment of equivalent length of a DNA having a sequence selected from the Target Gene Sequences Group, the Trigger Sequences Group, or the DNA complement of any thereof. In some embodiments, the RNA has an overall sequence of about 95%, about 96%, about 97%, about 98%, about 99%, or about 100% identity with a fragment of a DNA having a sequence selected from the Target Gene Sequences Group, the Trigger Sequences Group, or the DNA complement of any thereof.

[0093] The RNA in the insecticidal composition comprises at least one segment of 18 or more contiguous nucleotides with a sequence of about 95% to about 100% identity with a fragment of equivalent length of a DNA having a sequence selected from the Target Gene Sequences Group, the Trigger Sequences Group, or the DNA complement of any thereof. In some embodiments the RNA comprises at least one segment of 18 or more contiguous nucleotides, e.g., between 18-24, or between 18-28, or between 20-30, or between 20-50, or between 20-100, or between 50-100, or between 50-500, or between 100-250, or between 100-500, or between 200-1000, or between 500-2000, or even greater. In some embodiments the segment comprises more than 18 contiguous nucleotides, e.g., 19, 20, 21, 22, 23, 24, 25, 26, 27, 28, 29, 30, or greater than 30, e.g., at least about 35, at least about 40, at least about 45, at least about 50, at least about 55, at least about 60, at least about 65, at least about 70, at least about 75, at least about 80, at least about 85, at least about 90, at least about 95, at least about 100, at least about 110, at least about 120, at least about 130, at least about 140, at least about 150, at least about 160, at least about 170, at least about 180, at least about 190, at least about 200, at least about 210, at least about 220, at least about 230, at least about 240, at least about 250, at least about 260, at least about 270, at least about 280, at least about 290, at least about 300, at least about 350, at least about 400, at least about 450, at least about 500, or greater than 500 contiguous nucleotides. In particular embodiments, the RNA comprises at least one segment of at least 18, 19, 20, or 21 contiguous nucleotides with a sequence of 100% identity with a fragment of equivalent length of a DNA or target gene having a sequence selected from the Target Gene Sequences Group, the Trigger Sequences Group, or the DNA complement of any thereof. In particular embodiments, the RNA is a double-stranded nucleic acid (e.g., dsRNA) with one strand comprising at least one segment of at least 18, 19, 20, or 21 contiguous nucleotides with a sequence of 100% identity with a fragment of equivalent length of a DNA or target gene having a sequence selected from the Target Gene Sequences Group, the Trigger Sequences Group, or the DNA complement of any thereof; expressed as base-pairs, such a double-stranded nucleic acid comprises at least one segment of at least 18, 19, 20, or 21 contiguous, perfectly matched base-pairs which correspond to a fragment of equivalent length of a DNA or target gene having a sequence selected from the Target Gene Sequences Group, the Trigger Sequences Group, or the DNA complement of any thereof. In particular embodiments, each segment contained in the RNA is of a length greater than that which is typical of naturally occurring regulatory small RNAs, e.g., each segment is at least about 30 contiguous nucleotides (or base-pairs) in length. In some embodiments, the total length of the RNA, or the length of each segment contained in the RNA, is less than the total length of the sequence of interest (DNA or target gene having a sequence selected from the group consisting of the Target Gene Sequences Group). In some embodiments, the total length of the RNA is between about 50 to about 500 nucleotides (for single-stranded RNAs) or base-pairs (for double-stranded RNAs). In some embodiments, the RNA comprises at least one RNA strand of between about 50 to about 500 nucleotides in length.

[0094] The RNA in the insecticidal composition is generally designed to suppress one or more genes (“target genes”). Such target genes can include coding or non-coding sequence or both. In specific embodiments, the RNA is designed to suppress one or more target genes, where each target gene has a DNA sequence selected from the group consisting of the Target Gene Sequences Group. In various embodiments, the RNA is designed to suppress one or more genes, where each gene has a sequence selected from the group consisting of the Target Gene Sequences Group, and can be designed to suppress multiple genes from this group, or to target different regions of one or more of these genes. In an embodiment, the RNA comprises multiple sections or segments each of which comprises at least one segment of 21 contiguous nucleotides with a sequence of 100% identity with a fragment of equivalent length of a DNA having a sequence selected from the Target Gene Sequences Group, the Trigger Sequences Group, or the DNA complement of any thereof. In such cases, each section can be identical or different in size or in sequence, and can be sense or anti-sense relative to the target gene. For example, in one embodiment the RNA can include multiple sections in tandem or repetitive arrangements, wherein each section comprises at least one segment of 21 contiguous nucleotides with a sequence of 100% identity with a fragment of equivalent length of a DNA having a sequence selected from the Target Gene Sequences Group, the Trigger Sequences Group, or the DNA complement of any thereof; the segments can be from different regions of the target gene, e.g., the segments can correspond to different exon regions of the target gene, and “spacer” nucleotides which do not correspond to a target gene can optionally be used in between or adjacent to the segments.

[0095] The total length of the RNA in the insecticidal composition can be greater than 18 contiguous nucleotides, and can include nucleotides in addition to the contiguous nucleotides having the sequence of about 95% to about 100% identity with a fragment of equivalent length of a DNA having a sequence selected from the Target Gene Sequences Group, the Trigger Sequences Group, or the DNA complement of any thereof. In other words, the total length of the RNA can be greater than the length of the section or segment of the RNA designed to suppress one or more target genes, where each target gene has a DNA sequence selected from the group consisting of the Target Gene Sequences Group and Trigger Sequences Group. For example, the RNA can have nucleotides flanking the “active” segment of at least one segment of 18 or more contiguous nucleotides that suppresses the target gene, or include “spacer” nucleotides between active segments, or can have additional nucleotides at the 5′ end, or at the 3′ end, or at both the 5′ and 3′ ends. In an embodiment, the RNA comprises additional nucleotides that are not specifically related (having a sequence not complementary or identical to) to the DNA or target gene having a sequence selected from the Target Gene Sequences Group, the Trigger Sequences Group, or the DNA complement of any thereof, e.g., nucleotides that provide stabilizing secondary structure or for convenience in cloning or manufacturing. In an embodiment, the RNA comprises additional nucleotides located immediately adjacent to one or more segment of 18 or more contiguous nucleotides with a sequence of about 95% to about 100% identity with or complementarity to a fragment of equivalent length of a DNA, RNA or target gene having a sequence selected from the Target Gene Sequences Group, the Trigger Sequences Group, or the DNA complement of any thereof. In an embodiment, the RNA comprises one such segment, with an additional 5′ G or an additional 3′ C or both, adjacent to the segment. In another embodiment, the RNA is a double-stranded RNA comprising additional nucleotides to form an overhang, for example, a dsRNA comprising 2 deoxyribonucleotides to form a 3′ overhang. Thus in various embodiments, the nucleotide sequence of the entire RNA is not 100% identical or complementary to a fragment of contiguous nucleotides in the DNA or target gene having a sequence selected from the Target Gene Sequences Group or Trigger Sequences Group. For example, in some embodiments the RNA comprises at least two segments each of 21 contiguous nucleotides with a sequence of 100% identity with a fragment of a DNA having a sequence selected from the Target Gene Sequences Group, the Trigger Sequences Group, or the DNA complement of any thereof, wherein (1) the at least two segments are separated by one or more spacer nucleotides, or (2) the at least two segments are arranged in an order different from that in which the corresponding fragments occur in the DNA having a sequence selected from the Target Gene Sequences Group, the Trigger Sequences Group, or the DNA complement of any thereof.

[0096] In various embodiments the RNA in the insecticidal composition consists of naturally occurring ribonucleotides. Embodiments include, for example, synthetic RNAs consisting wholly of ribonucleotides or mainly of ribonucleotides but with one or more terminal deoxyribonucleotides or one or more terminal dideoxyribonucleotides. In certain embodiments, the RNA comprises non-canonical nucleotides such as inosine, thiouridine, or pseudouridine. In certain embodiments, the RNA comprises chemically modified nucleotides. (a) The RNA in the insecticidal composition is provided by suitable means known to one in the art. Embodiments include those wherein the RNA is chemically or enzymatically synthesized (e.g., by in vitro transcription, such as transcription using a T7 polymerase or other polymerase), produced by expression in a microorganism or in cell culture (such as plant or insect cells grown in culture), produced by expression in a plant cell, or produced by microbial fermentation.

[0097] In some embodiments the RNA is provided as an isolated RNA that is not part of an expression construct. In some embodiments the RNA is provided as an isolated RNA that is lacking additional elements such as a promoter or terminator sequences. Such RNAs can be relatively short, such as single- or double-stranded RNAs of between about 18 to about 300 or between about 50 to about 500 nucleotides (for single-stranded RNAs) or between about 18 to about 300 or between about 50 to about 500 base-pairs (for double-stranded RNAs). Alternatively the RNA can be provided in more complex constructs, e.g., as part of a recombinant expression construct, or included in a recombinant vector, for example in a recombinant plant virus vector or in a recombinant baculovirus vector. In some embodiments such recombinant expression constructs or vectors are designed to include additional elements, such as including additional RNA encoding an aptamer or ribozyme or an expression cassette for expressing a gene of interest (e.g., an insecticidal protein).

### VII. Methods of Providing Plants Having Improved Resistance to Lepidopteran Pest Infestations, and the Plants and Seeds Thus Provided

[0098] Another aspect of this invention is directed to a method of providing a plant having improved resistance to a Lepidopteran pest infestation comprising expressing in the plant at least one polynucleotide comprising at least one segment of 18 or more contiguous nucleotides that is essentially identical or complementary to a fragment of a target gene or DNA having a sequence selected from the Target Gene Sequences Group, the Trigger Sequences Group, or the DNA complement of any thereof, whereby the resulting plant has improved resistance to a Lepidopteran pest when compared to a control plant in which the polynucleotide is not expressed. In an embodiment, the method comprises expressing in the plant at least one polynucleotide comprising at least one segment of 18 or more contiguous nucleotides with a sequence of about 95% to about 100% identity with a fragment of equivalent length of a target gene or DNA having a sequence selected from the Target Gene Sequences Group, the Trigger Sequences Group, or the DNA complement of any thereof. In an embodiment, the invention provides a method of providing a plant having improved resistance to a Lepidopteran pest infestation comprising expressing in the plant at least one polynucleotide comprising at least one segment that is identical or complementary to at least 18, 19, 20, or 21 contiguous nucleotides of a DNA having a sequence selected from the group consisting of: SEQ ID NOs: 2, 5, 7, 9, 13, 21, 26, 27, 29, 36, 37, 39, 44, 47, 87, 95, 99, 103, 301, 309, 318, 319, 320, 321, 323, 324, 328, 341, 343, 346, 356, 358, 359, 503, 504, 505, 506, 509, 510, 530, 532, 533, 542, 545, 546, 547, 549, 551, 552, 553, 559, 560, 561, 563, 564, 570, 572, 573, 581, 593, 596, 602, 611, 612, 620, 665, 666, 672, 717, 730, 731, 736, 737, 738, 740, 741, 742, 743, 749, 757, 760, 761, 763, 766, 808, 809, 810, 814, 815, 817, 818, 821, 822, 1104, 1105, 1106, 1111, 1113, 1116, 1121, 1123, 1124, 1132, 1133, 1147, 1156, 1157, 1163, 1166, 1187, 1190, 1192, 1195, 1196, 1216, 1217, 1240, 1243, 1251, 1263, 1264, 1265, 1270, 1275, 1279, 1283, 1290, 1308, 1310, 1316, 1318, 1320, 1564, 1565, 1569, 1622, and 1623. By “expressing a polynucleotide in the plant” is generally meant “expressing an RNA transcript in the plant”, e.g., expressing in the plant an RNA comprising a ribonucleotide sequence that is anti-sense or essentially complementary to at least a fragment of a target gene or DNA having a sequence selected from the Target Gene Sequences Group, the Trigger Sequences Group, or the DNA complement of any thereof. Embodiments include those in which the polynucleotide expressed in the plant is an RNA comprising at least one segment having a sequence selected from the Trigger Sequences Group, or the complement thereof. However, the polynucleotide expressed in the plant can also be DNA (e.g., a DNA produced in the plant during genome replication), or the RNA encoded by such DNA. Related aspects of the invention include isolated polynucleotides of use in the method and plants having improved Lepidopteran resistance provided by the method.

[0099] The method comprises expressing at least one polynucleotide in a plant, wherein the polynucleotide comprises at least one segment of 18 or more contiguous nucleotides that is essentially identical or complementary to a fragment of a target gene or DNA having a sequence selected from the Target Gene Sequences Group, the Trigger Sequences Group, or the DNA complement of any thereof. In some embodiments, a first polynucleotide is provided to a plant in the form of DNA (e.g., in the form of an isolated DNA molecule, or as an expression construct, or as a transformation vector), and the polynucleotide expressed in the plant is a second polynucleotide (e.g., the RNA transcript of the first polynucleotide) in the plant. In an embodiment, the polynucleotide is expressed in the plant by transgenic expression, i.e., by stably integrating the polynucleotide into the plant's genome from where it can be expressed in a cell or cells of the plant. In an embodiment, a first polynucleotide (e.g., a recombinant DNA construct comprising a promoter operably linked to DNA comprising at least one segment of 18 or more contiguous nucleotides that is essentially identical or complementary to a fragment of a target gene or DNA having a sequence selected from the Target Gene Sequences Group, the Trigger Sequences Group, or the DNA complement of any thereof) is stably integrated into the plant's genome from where secondarily produced polynucleotides (e.g., an RNA transcript comprising the transcript of the segment of 18 or more contiguous nucleotides that is essentially identical or complementary to a fragment of a target gene or DNA having a sequence selected from the Target Gene Sequences Group, the Trigger Sequences Group, or the DNA complement of any thereof) are expressed in a cell or cells of the plant. Methods of providing stably transformed plants are provided in the section headed “Making and Using Transgenic Plant Cells and Transgenic Plants”.

[0100] In another embodiment the polynucleotide expressed in the plant is expressed by transient expression (i.e., expression not resulting from stable integration of a sequence into the plant's genome). In such embodiments the method can include a step of introducing a polynucleotide (e.g., dsRNA or dsDNA) into the plant by routine techniques known in the art. For example, transient expression can be accomplished by infiltration of a polynucleotide solution using a needle-less syringe into a leaf of a plant.

[0101] In some embodiments where the polynucleotide expressed in the plant is expressed by transient expression, a first polynucleotide is provided to a plant in the form of RNA or DNA or both RNA and DNA, and a secondarily produced second polynucleotide is transiently expressed in the plant. In some embodiments, the first polynucleotide is one or more selected from: (a) a single-stranded RNA molecule (ssRNA), (b) a single-stranded RNA molecule that self-hybridizes to form a double-stranded RNA molecule, (c) a double-stranded RNA molecule (dsRNA), (d) a single-stranded DNA molecule (ssDNA), (e) a single-stranded DNA molecule that self-hybridizes to form a double-stranded DNA molecule, (f) a single-stranded DNA molecule comprising a modified Pol III gene that is transcribed to an RNA molecule, (g) a double-stranded DNA molecule (dsDNA), (h) a double-stranded DNA molecule comprising a modified Pol III gene that is transcribed to an RNA molecule, and (i) a double-stranded, hybridized RNA/DNA molecule, or combinations thereof. In specific embodiments, a first polynucleotide is introduced into the plant by topical application to the plant of a polynucleotide-containing composition in a suitable form, e.g., as a solid, liquid (including homogeneous mixtures such as solutions and non-homogeneous mixtures such as suspensions, colloids, micelles, and emulsions), powder, suspension, emulsion, spray, encapsulated or micro-encapsulation formulation, in or on microbeads or other carrier particulates, in a film or coating, or on or within a matrix, or in the form of a treatment of a crop plant seed or treatment of a seed potato. Suitable binders, inert carriers, surfactants, and the like can optionally be included in the composition, as is known to one skilled in formulation of pesticides and seed treatments. In such embodiments, the polynucleotide-containing composition can further include one or more components selected from the group consisting of a carrier agent, a surfactant, a cationic lipid (such as that disclosed in Example 18 of U.S. patent application publication 2011/0296556, incorporated by reference herein), an organosilicone, an organosilicone surfactant, a polynucleotide herbicidal molecule, a non-polynucleotide herbicidal molecule, a non-polynucleotide pesticide, a safener, and an insect growth regulator; in one embodiment the composition further comprises a nonionic organosilicone surfactant such as SILWET® brand surfactants, e.g., SILWET L-77® brand surfactant having CAS Number 27306-78-1 and EPA Number: CAL.REG.NO. 5905-50073-AA, currently available from Momentive Performance Materials, Albany, N.Y. In some embodiments, the topically applied composition further comprises at least one pesticidal agent selected from the group consisting of a patatin, a plant lectin, a phytoecdysteroid, a Bacillus thuringiensis insecticidal protein, a Xenorhabdus insecticidal protein, a Photorhabdus insecticidal protein, a Bacillus laterosporus insecticidal protein, and a Bacillus sphaericus insecticidal protein. Alternatively such additional components or pesticidal agents can be provided separately, e.g., by separate topical application or by transgenic expression in the plant. Alternatively the plant is topically treated with the polynucleotide-containing composition as well as with a separate (preceding, following, or concurrent) application of a substance that improves the efficacy of the polynucleotide-containing composition. For example, a plant can be sprayed with a first topical application of a solution containing a nonionic organosilicone surfactant such as SILWET® brand surfactants, e.g., SILWET L-77® brand surfactant, followed by a second topical application of the polynucleotide-containing composition, or vice-versa.

[0102] It is anticipated that the combination of certain polynucleotides of use in this method (e.g., the polynucleotide triggers described in the working Examples) with one or more non-polynucleotide pesticidal agents will result in an enhanced improvement in prevention or control of Lepidopteran pest infestations, when compared to the effect obtained with the polynucleotide alone or the non-polynucleotide pesticidal agent alone. In an embodiment, a transgenic plant expressing at least one polynucleotide comprising at least one segment of 18 or more contiguous nucleotides that is essentially identical or complementary to a fragment of a target gene or DNA having a sequence selected from the Target Gene Sequences Group, the Trigger Sequences Group, or the DNA complement of any thereof (e.g., the polynucleotide triggers described in the working Examples) and one or more genes encoding a non-polynucleotide pesticidal agent selected from the group consisting of a patatin, a plant lectin, a phytoecdysteroid, a Bacillus thuringiensis insecticidal protein, a Xenorhabdus insecticidal protein, a Photorhabdus insecticidal protein, a Bacillus laterosporus insecticidal protein, and a Bacillus sphaericus insecticidal protein, is found to exhibit improved resistance to Lepidopteran pest infestations.

[0103] In some embodiments where the polynucleotide expressed in the plant is expressed by transient expression, a first polynucleotide is provided to a plant in the form of RNA or DNA or both RNA and DNA, and a secondarily produced second polynucleotide is transiently expressed in the plant; the site of application of the first polynucleotide need not be the same site where the second polynucleotide is transiently expressed. For example, a first polynucleotide can be provided to a plant by topical application onto a leaf, or by injection into a stem, and the second polynucleotide can be transiently expressed elsewhere in the plant, e.g., in the roots or throughout the plant. In some embodiments of the method, a composition comprising at least one polynucleotide is topically applied to above-ground parts of the plant, e.g., sprayed or dusted onto leaves, stems, and flowering parts of the plant. In other embodiments, a composition comprising at least one polynucleotide is topically applied to below-ground parts of the plant, such as to the roots, e.g., by means of a soil drench. In other embodiments, a composition comprising at least one polynucleotide is topically applied to a seed (or, in the case of potatoes, topically applied to a seed potato) that is grown into the plant having improved resistance to a Lepidopteran pest infestation. In some embodiments the polynucleotide expressed in the plant is RNA, which can be single-stranded (ss) or double-stranded (ds) RNA or a combination of both.

[0104] In some embodiments a first polynucleotide (DNA or RNA or both) is provided to a plant and a second polynucleotide having a sequence corresponding (identical or complementary) to the first polynucleotide is subsequently expressed in the plant. In such embodiments the polynucleotide expressed in the plant is an RNA transcript which can be ssRNA or dsRNA or a combination of both. In some embodiments where the polynucleotide is expressed by transient expression, a first polynucleotide is provided to a plant in the form of RNA or DNA or both RNA and DNA, and a secondarily produced second polynucleotide is transiently expressed in the plant; in such embodiments, the first polynucleotide one or more selected from: (a) a single-stranded RNA molecule (ssRNA), (b) a single-stranded RNA molecule that self-hybridizes to form a double-stranded RNA molecule, (c) a double-stranded RNA molecule (dsRNA), (d) a single-stranded DNA molecule (ssDNA), (e) a single-stranded DNA molecule that self-hybridizes to form a double-stranded DNA molecule, (f) a single-stranded DNA molecule comprising a modified Pol III gene that is transcribed to an RNA molecule, (g) a double-stranded DNA molecule (dsDNA), (h) a double-stranded DNA molecule comprising a modified Pol III gene that is transcribed to an RNA molecule, and (i) a double-stranded, hybridized RNA/DNA molecule, or combinations thereof. In such embodiments where the polynucleotide is expressed by transient expression the first polynucleotide can consist of naturally occurring nucleotides, such as those which occur in DNA and RNA. In such embodiments where the polynucleotide is expressed by transient expression the first polynucleotide can be chemically modified, or comprises chemically modified nucleotides. The first polynucleotide is provided by suitable means known to one in the art. Embodiments include those wherein the first polynucleotide is chemically or enzymatically synthesized (e.g., by in vitro transcription, such as transcription using a T7 polymerase or other polymerase), produced by expression in a microorganism or in cell culture (such as plant or insect cells grown in culture), produced by expression in a plant cell, or produced by microbial fermentation. The first polynucleotide can be provided as an RNA or DNA fragment. Alternatively the first polynucleotide can be provided in more complex constructs, e.g., as part of a recombinant expression construct, or included in a recombinant vector, for example in a recombinant plant virus vector or in a recombinant baculovirus vector; such recombinant expression constructs or vectors can be designed to include additional elements, such as expression cassettes for expressing a gene of interest (e.g., an insecticidal protein).

[0105] In some embodiments the polynucleotide expressed in the plant is an RNA molecule and can be relatively short, such as single- or double-stranded RNAs of between about 18 to about 300 or between about 50 to about 500 nucleotides (for single-stranded RNAs) or between about 18 to about 300 or between about 50 to about 500 base-pairs (for double-stranded RNAs). Alternatively the polynucleotide can be provided in more complex constructs, e.g., as part of a recombinant expression construct, or included in a recombinant vector, for example in a recombinant plant virus vector or in a recombinant baculovirus vector. In some embodiments such recombinant expression constructs or vectors are designed to include additional elements, such as expression cassettes for expressing a gene of interest (e.g., an insecticidal protein).

[0106] The polynucleotide expressed in the plant has at least one segment of 18 or more contiguous nucleotides with a sequence of about 95% to about 100% identity with a fragment of equivalent length of a DNA having a sequence selected from the Target Gene Sequences Group or the Trigger Sequences Group, or the DNA complement of any of the foregoing. In an embodiment the polynucleotide expressed in the plant comprises at least one segment of 18 or more contiguous nucleotides that are essentially identical or complementary to a fragment of equivalent length of a DNA having a sequence selected from the Target Gene Sequences Group, the Trigger Sequences Group, or the DNA complement of any thereof. In some embodiments, the contiguous nucleotides have a sequence of about 95%, about 96%, about 97%, about 98%, about 99%, or about 100% identity with a fragment of a DNA having a sequence selected from the Target Gene Sequences Group or the Trigger Sequences Group, or the DNA complement of any thereof. In some embodiments the contiguous nucleotides are exactly (100%) identical to a fragment of equivalent length of a DNA having a sequence selected from the Target Gene Sequences Group or the Trigger Sequences Group, or the DNA complement of any thereof. In some embodiments, the polynucleotide expressed in the plant has an overall sequence of about 95%, about 96%, about 97%, about 98%, about 99%, or about 100% identity with a fragment of a DNA having a sequence selected from the Target Gene Sequences Group or the Trigger Sequences Group, or the DNA complement of any thereof.

[0107] The polynucleotide expressed in the plant is generally designed to suppress one or more genes (“target genes”). Such target genes can include coding or non-coding sequence or both. In specific embodiments, the polynucleotide expressed in the plant is designed to suppress one or more target genes, where each target gene has a DNA sequence selected from the group consisting of the Target Gene Sequences Group. In various embodiments, the polynucleotide expressed in the plant is designed to suppress one or more genes, where each gene has a sequence selected from the group consisting of the Target Gene Sequences Group, and can be designed to suppress multiple genes from this group, or to target different regions of one or more of these genes. In an embodiment, the polynucleotide expressed in the plant comprises multiple sections or segments each of which comprises at least one segment of 21 contiguous nucleotides with a sequence of 100% identity with a fragment of equivalent length of a DNA having a sequence selected from the Target Gene Sequences Group or the Trigger Sequences Group, or the DNA complement of any thereof. In such cases, each section can be identical or different in size or in sequence, and can be sense or anti-sense relative to the target gene. For example, in one embodiment the polynucleotide expressed in the plant can include multiple sections in tandem or repetitive arrangements, wherein each section comprises at least one segment of 21 contiguous nucleotides with a sequence of 100% identity with a fragment of equivalent length of a DNA having a sequence selected from the Target Gene Sequences Group or the DNA complement thereof the segments can be from different regions of the target gene, e.g., the segments can correspond to different exon regions of the target gene, and “spacer” nucleotides which do not correspond to a target gene can optionally be used in between or adjacent to the segments.

[0108] The total length of the polynucleotide expressed in the plant can be greater than 18 contiguous nucleotides, and can include nucleotides in addition to the contiguous nucleotides having the sequence of about 95% to about 100% identity with a fragment of equivalent length of a DNA having a sequence selected from the Target Gene Sequences Group or the DNA complement thereof. In other words, the total length of the polynucleotide expressed in the plant can be greater than the length of the section or segment of the polynucleotide designed to suppress one or more target genes, where each target gene has a DNA sequence selected from the group consisting of the Target Gene Sequences Group. For example, the polynucleotide expressed in the plant can have nucleotides flanking the “active” segment of at least one segment of 18 or more contiguous nucleotides that suppresses the target gene, or include “spacer” nucleotides between active segments, or can have additional nucleotides at the 5′ end, or at the 3′ end, or at both the 5′ and 3′ ends. In an embodiment, the polynucleotide expressed in the plant comprises additional nucleotides that are not specifically related (i.e., having a sequence not complementary or identical to) to the DNA or target gene having a sequence selected from the Target Gene Sequences Group or the DNA complement thereof, e.g., nucleotides that provide stabilizing secondary structure or for convenience in cloning or manufacturing. In an embodiment, the polynucleotide expressed in the plant comprises additional nucleotides located immediately adjacent to one or more segment of 18 or more contiguous nucleotides with a sequence of about 95% to about 100% identity with or complementarity to a fragment of equivalent length of a DNA or target gene having a sequence selected from the group consisting of the Target Gene Sequences Group. In an embodiment, the polynucleotide expressed in the plant comprises one such segment, with an additional 5′ G or an additional 3′ C or both, adjacent to the segment. In another embodiment, the polynucleotide expressed in the plant is a double-stranded RNA comprising additional nucleotides to form an overhang, for example, a dsRNA comprising 2 deoxyribonucleotides to form a 3′ overhang. Thus in various embodiments, the nucleotide sequence of the entire polynucleotide expressed in the plant is not 100% identical or complementary to a fragment of contiguous nucleotides in the DNA or target gene having a sequence selected from the Target Gene Sequences Group, the Trigger Sequences Group, or the DNA complement of any thereof. For example, in some embodiments the polynucleotide expressed in the plant comprises at least two segments each of 21 contiguous nucleotides with a sequence of 100% identity with a fragment of a DNA having a sequence selected from the Target Gene Sequences Group, the Trigger Sequences Group, or the DNA complement of any thereof, wherein (1) the at least two segments are separated by one or more spacer nucleotides, or (2) the at least two segments are arranged in an order different from that in which the corresponding fragments occur in the DNA having a sequence selected from the Target Gene Sequences Group, the Trigger Sequences Group, or the DNA complement of any thereof.

[0109] In a related aspect, this invention is directed to the plant having improved resistance to a Lepidopteran pest infestation, provided by expressing in the plant at least one polynucleotide comprising at least one segment of 18 or more contiguous nucleotides that are essentially identical or complementary to a fragment of equivalent length of a DNA having a sequence selected from the Target Gene Sequences Group, the Trigger Sequences Group, or the DNA complement of any thereof, whereby the resulting plant has improved resistance to a Lepidopteran pest infestation when compared to a control plant in which the polynucleotide is not expressed. In a related aspect, this invention is directed to the plant having improved resistance to a Lepidopteran pest infestation, provided by expressing in the plant at least one polynucleotide comprising at least one segment of 18 or more contiguous nucleotides with a sequence of about 95% to about 100% identity with a fragment of equivalent length of a DNA having a sequence selected from the Target Gene Sequences Group or the Trigger Sequences Group, or the DNA complement of any thereof, whereby the resulting plant has improved resistance to a Lepidopteran pest infestation when compared to a control plant in which the polynucleotide is not expressed. An embodiment is a crop plant having improved resistance to a Lepidopteran pest infestation when compared to a control plant, provided by expressing in the plant an RNA having a sequence selected from the Trigger Sequences Group, or the complement thereof. In yet another aspect, this invention is directed to seed (especially transgenic progeny seed) produced by the plant having improved resistance to a Lepidopteran pest infestation, as provided by this method. Also contemplated is a commodity product produced by the plant having improved resistance to a Lepidopteran pest infestation, as provided by this method, and a commodity product produced from the transgenic progeny seed of such a plant.

### VIII. Recombinant DNA Constructs for Controlling a Lepidopteran Pest

[0110] Another aspect of this invention provides a recombinant DNA construct comprising a heterologous promoter operably linked to a DNA element comprising at least one segment of 18 or more contiguous nucleotides with a sequence of about 95% to about 100% identity with a fragment of a DNA having a sequence selected from the Target Gene Sequences Group, the Trigger Sequences Group, or the DNA complement of any thereof. In some embodiments, the recombinant DNA construct comprises a heterologous promoter operably linked to: (a) DNA comprising a nucleotide sequence that is complementary to at least 18, 19, 20 or 21 contiguous nucleotides of a target gene having a sequence selected from the group consisting of: SEQ ID NOs: 2, 5, 7, 9, 13, 21, 26, 27, 29, 36, 37, 39, 44, 47, 87, 95, 99, 103, 301, 309, 318, 319, 320, 321, 323, 324, 328, 341, 343, 346, 356, 358, 359, 503, 504, 505, 506, 509, 510, 530, 532, 533, 542, 545, 546, 547, 549, 551, 552, 553, 559, 560, 561, 563, 564, 570, 572, 573, 581, 593, 596, 602, 611, 612, 620, 665, 666, 672, 717, 730, 731, 736, 737, 738, 740, 741, 742, 743, 749, 757, 760, 761, 763, 766, 808, 809, 810, 814, 815, 817, 818, 821, 822, 1104, 1105, 1106, 1111, 1113, 1116, 1121, 1123, 1124, 1132, 1133, 1147, 1156, 1157, 1163, 1166, 1187, 1190, 1192, 1195, 1196, 1216, 1217, 1240, 1243, 1251, 1263, 1264, 1265, 1270, 1275, 1279, 1283, 1290, 1308, 1310, 1316, 1318, 1320, 1564, 1565, 1569, 1622, and 1623, or an RNA transcribed from the target gene; or (b) a DNA comprising 18, 19, 20, or 21 or more contiguous nucleotides having 100% identity to a fragment of equivalent length of a DNA having a sequence selected from the group consisting of: SEQ ID NOs: 2, 5, 7, 9, 13, 21, 26, 27, 29, 36, 37, 39, 44, 47, 87, 95, 99, 103, 301, 309, 318, 319, 320, 321, 323, 324, 328, 341, 343, 346, 356, 358, 359, 503, 504, 505, 506, 509, 510, 530, 532, 533, 542, 545, 546, 547, 549, 551, 552, 553, 559, 560, 561, 563, 564, 570, 572, 573, 581, 593, 596, 602, 611, 612, 620, 665, 666, 672, 717, 730, 731, 736, 737, 738, 740, 741, 742, 743, 749, 757, 760, 761, 763, 766, 808, 809, 810, 814, 815, 817, 818, 821, 822, 1104, 1105, 1106, 1111, 1113, 1116, 1121, 1123, 1124, 1132, 1133, 1147, 1156, 1157, 1163, 1166, 1187, 1190, 1192, 1195, 1196, 1216, 1217, 1240, 1243, 1251, 1263, 1264, 1265, 1270, 1275, 1279, 1283, 1290, 1308, 1310, 1316, 1318, 1320, 1564, 1565, 1569, 1622, and 1623, or the DNA complement thereof; or (c) DNA encoding at least one silencing element that is complementary to at least 18, 19, 20, or 21 contiguous nucleotides of a target gene or an RNA transcribed from the target gene, wherein the target gene has a sequence selected from the group consisting of: SEQ ID NOs: 2, 5, 7, 9, 13, 21, 26, 27, 29, 36, 37, 39, 44, 47, 87, 95, 99, 103, 301, 309, 318, 319, 320, 321, 323, 324, 328, 341, 343, 346, 356, 358, 359, 503, 504, 505, 506, 509, 510, 530, 532, 533, 542, 545, 546, 547, 549, 551, 552, 553, 559, 560, 561, 563, 564, 570, 572, 573, 581, 593, 596, 602, 611, 612, 620, 665, 666, 672, 717, 730, 731, 736, 737, 738, 740, 741, 742, 743, 749, 757, 760, 761, 763, 766, 808, 809, 810, 814, 815, 817, 818, 821, 822, 1104, 1105, 1106, 1111, 1113, 1116, 1121, 1123, 1124, 1132, 1133, 1147, 1156, 1157, 1163, 1166, 1187, 1190, 1192, 1195, 1196, 1216, 1217, 1240, 1243, 1251, 1263, 1264, 1265, 1270, 1275, 1279, 1283, 1290, 1308, 1310, 1316, 1318, 1320, 1564, 1565, 1569, 1622, and 1623; or (d) DNA encoding at least one silencing element comprising at least 18, 19, 20 or 21 contiguous nucleotides that are complementary to a target gene selected from the genes in the Target Gene Sequences Group or an RNA transcribed from the target gene; or (e) DNA encoding a RNA comprising at least 18, 19, 20, or 21 contiguous nucleotides that are complementary to a nucleotide sequence selected from the Trigger Sequences Group, or the complement thereof, or an orthologous nucleotide sequence from a Lepidopteran pest, wherein the orthologous nucleotide sequence has at least 95% sequence identity with a nucleotide sequence selected from the Trigger Sequences Group, wherein the percentage sequence identity is calculated over the same length; or (f) DNA encoding a RNA comprising at least one double-stranded RNA region, at least one strand of which comprises at least 18, 19, 20 or 21 contiguous nucleotides that are complementary to a nucleotide sequence selected from the Trigger Sequences Group, or the complement thereof, or an orthologous nucleotide sequence from a Lepidopteran pest, wherein the orthologous nucleotide sequence has at least 95% sequence identity with a nucleotide sequence selected from the Target Gene Sequences Group, the Trigger Sequences Group, or the DNA complement of any thereof, wherein the percentage sequence identity is calculated over the same length; or (g) DNA encoding RNA comprising a nucleotide sequence selected from the Trigger Sequences Group, or the complement thereof. Embodiments include a recombinant DNA construct comprising a heterologous promoter operably linked to a DNA element encoding an RNA having a sequence selected from the group consisting of: SEQ ID NO: 115, 116, 119, 121, 123, 127, 135, 140, 141, 143, 150, 151, 153, 158, 161, 201, 209, 213, 217, 434, 442, 451, 452, 453, 454, 456, 457, 461, 474, 476, 479, 489, 491, 492, 521, 522, 523, 524, 527, 528, 536, 538, 539, 823, 826, 827, 828, 830, 832, 833, 834, 840, 841, 842, 844, 845, 851, 853, 854, 862, 874, 877, 883, 892, 893, 901, 946, 947, 953, 998, 1011, 1012, 1017, 1018, 1019, 1021, 1022, 1023, 1024, 1030, 1038, 1041, 1042, 1044, 1047, 1089, 1090, 1091, 1095, 1096, 1098, 1099, 1102, 1103, 1334, 1335, 1336, 1341, 1343, 1346, 1351, 1353, 1354, 1362, 1363, 1377, 1386, 1387, 1393, 1396, 1417, 1420, 1422, 1425, 1426, 1446, 1447, 1470, 1473, 1481, 1493, 1494, 1495, 1500, 1505, 1509, 1513, 1520, 1538, 1540, 1546, 1548, 1550, 1624, 1625, 1629, 1682, or 1683, or a combination thereof. or the complement thereof.

[0111] Embodiments include a recombinant DNA construct comprising a heterologous promoter operably linked to a DNA encoding a dsRNA with a strand having a sequence selected from the Trigger Sequences Group, or a fragment thereof, or a complement of any thereof. The recombinant DNA constructs are useful in providing a plant having improved resistance to a Lepidopteran pest infestation, e.g., by expressing in a plant a transcript of such a recombinant DNA construct. The recombinant DNA constructs are also useful in the manufacture of polynucleotides useful in making compositions that can be applied to a plant, seed, propagatable plant part, soil or field, or surface in need of protection from a Lepidopteran pest infestation. Related aspects of the invention include: compositions comprising the recombinant DNA construct; a plant chromosome or a plastid or a recombinant plant virus vector or a recombinant baculovirus vector comprising the recombinant DNA construct; a transgenic solanaceous plant cell having in its genome the recombinant DNA construct, optionally comprising in its genome DNA encoding at least one pesticidal agent selected from the group consisting of a patatin, a plant lectin, a phytoecdysteroid, a Bacillus thuringiensis insecticidal protein, a Xenorhabdus insecticidal protein, a Photorhabdus insecticidal protein, a Bacillus laterosporus insecticidal protein, and a Bacillus sphaericus insecticidal protein, and a transgenic solanaceous plant including such a transgenic solanaceous plant cell, or a fruit, seed, or propagatable part of the transgenic solanaceous plant; and plants having improved Lepidopteran resistance provided by expression of or treatment with the recombinant DNA construct or the RNA encoded therein.

[0112] The recombinant DNA construct comprises a heterologous promoter operably linked to DNA comprising at least one segment of 18 or more contiguous nucleotides with a sequence of about 95% to about 100% identity with a fragment of equivalent length of a DNA having a sequence selected from the Target Gene Sequences Group or the DNA complement thereof. In some embodiments, the segment of 18 or more contiguous nucleotides has a sequence with about 95%, about 96%, about 97%, about 98%, about 99%, or about 100% identity with a fragment of a DNA having a sequence selected from the Target Gene Sequences Group or the DNA complement thereof. In some embodiments the contiguous nucleotides are exactly (100%) identical to a fragment of equivalent length of a DNA having a sequence selected from the Target Gene Sequences Group or the DNA complement thereof. In some embodiments, the DNA has an overall sequence of about 95%, about 96%, about 97%, about 98%, about 99%, or about 100% identity with a DNA having a sequence selected from the Target Gene Sequences Group or the DNA complement thereof.

[0113] The recombinant DNA construct therefore comprises a heterologous promoter operably linked to DNA comprising at least one segment of 18 or more contiguous nucleotides designed to suppress expression of a target gene having a sequence selected from the Target Gene Sequences Group or the DNA complement thereof. In some embodiments the DNA comprises at least one segment of 18 or more contiguous nucleotides, e.g., between 18-24, or between 18-28, or between 20-30, or between 20-50, or between 20-100, or between 50-100, or between 50-500, or between 100-250, or between 100-500, or between 200-1000, or between 500-2000, or even greater. In some embodiments the segment comprises more than 18 contiguous nucleotides, e.g., 19, 20, 21, 22, 23, 24, 25, 26, 27, 28, 29, 30, or greater than 30, e.g., at least about 35, at least about 40, at least about 45, at least about 50, at least about 55, at least about 60, at least about 65, at least about 70, at least about 75, at least about 80, at least about 85, at least about 90, at least about 95, at least about 100, at least about 110, at least about 120, at least about 130, at least about 140, at least about 150, at least about 160, at least about 170, at least about 180, at least about 190, at least about 200, at least about 210, at least about 220, at least about 230, at least about 240, at least about 250, at least about 260, at least about 270, at least about 280, at least about 290, at least about 300, at least about 350, at least about 400, at least about 450, at least about 500, or greater than 500 contiguous nucleotides. In particular embodiments, the DNA encodes an RNA containing at least one segment of at least 18, 19, 20, or 21 contiguous nucleotides with a sequence of 100% identity with a fragment of equivalent length of a DNA or target gene having a sequence selected from the Target Gene Sequences Group or the DNA complement thereof. In particular embodiments, the DNA encodes a double-stranded nucleic acid (e.g., dsRNA) with one strand comprising at least one segment of at least 18, 19, 20, or 21 contiguous nucleotides with a sequence of 100% identity with a fragment of equivalent length of a DNA or target gene having a sequence selected from the Target Gene Sequences Group or the DNA complement thereof; expressed as base-pairs, such a double-stranded nucleic acid comprises at least one segment of at least 18, 19, 20, or 21 contiguous, perfectly matched base-pairs which correspond to a fragment of equivalent length of a DNA or target gene having a sequence selected from the Target Gene Sequences Group or the DNA complement thereof. In particular embodiments, each segment contained in the DNA is of a length greater than that which is typical of naturally occurring regulatory small RNAs. In some embodiments, each segment is at least about 30 contiguous nucleotides (or base-pairs) in length. In some embodiments, the total length of the DNA, or the length of each segment contained in the polynucleotide, is less than the total length of the sequence of interest (DNA or target gene having a sequence selected from the group consisting of the Target Gene Sequences Group). In some embodiments, the total length of the DNA is between about 50 to about 500. In some embodiments, the DNA encodes an RNA having a sequence selected from the group consisting of: SEQ ID NO: 115, 116, 119, 121, 123, 127, 135, 140, 141, 143, 150, 151, 153, 158, 161, 201, 209, 213, 217, 434, 442, 451, 452, 453, 454, 456, 457, 461, 474, 476, 479, 489, 491, 492, 521, 522, 523, 524, 527, 528, 536, 538, 539, 823, 826, 827, 828, 830, 832, 833, 834, 840, 841, 842, 844, 845, 851, 853, 854, 862, 874, 877, 883, 892, 893, 901, 946, 947, 953, 998, 1011, 1012, 1017, 1018, 1019, 1021, 1022, 1023, 1024, 1030, 1038, 1041, 1042, 1044, 1047, 1089, 1090, 1091, 1095, 1096, 1098, 1099, 1102, 1103, 1334, 1335, 1336, 1341, 1343, 1346, 1351, 1353, 1354, 1362, 1363, 1377, 1386, 1387, 1393, 1396, 1417, 1420, 1422, 1425, 1426, 1446, 1447, 1470, 1473, 1481, 1493, 1494, 1495, 1500, 1505, 1509, 1513, 1520, 1538, 1540, 1546, 1548, 1550, 1624, 1625, 1629, 1682, or 1683 or a combination thereof, or the complement thereof.

[0114] The recombinant DNA construct comprises a heterologous promoter operably linked to DNA generally designed to suppress one or more genes (“target genes”). Such target genes can include coding or non-coding sequence or both. In specific embodiments, the recombinant DNA construct is designed to suppress one or more target genes, where each target gene has a DNA sequence selected from the group consisting of the Target Gene Sequences Group. In various embodiments, the recombinant DNA construct is designed to suppress one or more genes, where each gene has a sequence selected from the group consisting of the Target Gene Sequences Group, and can be designed to suppress multiple genes from this group, or to target different regions of one or more of these genes. In an embodiment, the recombinant DNA construct comprises a heterologous promoter operably linked to multiple sections or segments each of which comprises at least one segment of 21 contiguous nucleotides with a sequence of 100% identity with a fragment of equivalent length of a DNA having a sequence selected from the Target Gene Sequences Group or the DNA complement thereof. In such cases, each section can be identical or different in size or in sequence, and can be sense or anti-sense relative to the target gene. For example, in one embodiment the recombinant DNA construct can include a heterologous promoter operably linked to multiple sections in tandem or repetitive arrangements, wherein each section comprises at least one segment of 21 contiguous nucleotides with a sequence of 100% identity with a fragment of equivalent length of a DNA having a sequence selected from the Target Gene Sequences Group or the DNA complement thereof the segments can be from different regions of the target gene, e.g., the segments can correspond to different exon regions of the target gene, and “spacer” nucleotides which do not correspond to a target gene can optionally be used in between or adjacent to the segments.

[0115] The recombinant DNA construct comprises a heterologous promoter operably linked to DNA which can have a total length that is greater than 18 contiguous nucleotides, and can include nucleotides in addition to the segment of at least one segment of 18 or more contiguous nucleotides having the sequence of about 95% to about 100% identity with a fragment of equivalent length of a DNA having a sequence selected from the Target Gene Sequences Group or the DNA complement thereof. In other words, the total length of the DNA can be greater than the length of the segment of the DNA designed to suppress one or more target genes, where each target gene has a DNA sequence selected from the group consisting of the Target Gene Sequences Group. For example, the DNA can have nucleotides flanking the “active” segment of at least one segment of 18 or more contiguous nucleotides that suppresses the target gene, or include “spacer” nucleotides between active segments, or can have additional nucleotides at the 5′ end, or at the 3′ end, or at both the 5′ and 3′ ends. In an embodiment, the heterologous promoter is operably linked to DNA comprising additional nucleotides that are not specifically related (having a sequence not complementary or identical to) to the DNA or target gene having a sequence selected from the Target Gene Sequences Group or the DNA complement thereof, e.g., nucleotides that provide stabilizing secondary structure or for convenience in cloning or manufacturing. In an embodiment, the heterologous promoter is operably linked to DNA comprising additional nucleotides located immediately adjacent to one or more segment of 18 or more contiguous nucleotides with a sequence of about 95% to about 100% identity with or complementarity to a fragment of equivalent length of a DNA or target gene having a sequence selected from the Target Gene Sequences Group, the Trigger Sequences Group, or the DNA complement of any thereof. In an embodiment, the heterologous promoter is operably linked to DNA comprising one such segment, with an additional 5′ G or an additional 3′ C or both, adjacent to the segment. In another embodiment, the heterologous promoter is operably linked to DNA encoding a double-stranded RNA comprising additional nucleotides to form an overhang. Thus in various embodiments, the nucleotide sequence of the entire DNA operably linked to the heterologous promoter is not 100% identical or complementary to a fragment of contiguous nucleotides in the DNA or target gene having a sequence selected from the Target Gene Sequences Group, the Trigger Sequences Group, or the DNA complement of any thereof. For example, in some embodiments the heterologous promoter is operably linked to DNA comprising at least two segments each of 21 contiguous nucleotides with a sequence of 100% identity with a fragment of a DNA having a sequence selected from the Target Gene Sequences Group, the Trigger Sequences Group, or the DNA complement of any thereof, wherein (1) the at least two segments are separated by one or more spacer nucleotides, or (2) the at least two segments are arranged in an order different from that in which the corresponding fragments occur in the DNA having a sequence selected from the Target Gene Sequences Group, the Trigger Sequences Group, or the DNA complement of any thereof.

[0116] In recombinant DNA constructs, the heterologous promoter is operably linked to DNA that encodes a transcript that can be single-stranded (ss) or double-stranded (ds) or a combination of both. Embodiments of the method include those wherein the DNA encodes a transcript comprising sense single-stranded RNA (ssRNA), anti-sense ssRNA, or double-stranded RNA (dsRNA), or a combination of any of these.

[0117] The recombinant DNA construct is provided by suitable means known to one in the art. Embodiments include those wherein the recombinant DNA construct is synthesized in vitro, produced by expression in a microorganism or in cell culture (such as plant or insect cells grown in culture), produced by expression in a plant cell, or produced by microbial fermentation.

[0118] The heterologous promoter of use in recombinant DNA constructs is selected from the group consisting of a promoter functional in a plant, a promoter functional in a prokaryote, a promoter functional in a fungal cell, and a baculovirus promoter. Non-limiting examples of promoters are described in the section headed “Promoters”.

[0119] In some embodiments, the recombinant DNA construct comprises a second promoter also operably linked to the DNA. For example, the DNA comprising at least one segment of 18 or more contiguous nucleotides can be flanked by two promoters arranged so that the promoters transcribe in opposite directions and in a convergent manner, yielding opposite-strand transcripts of the DNA that are complementary to and capable of hybridizing with each other to form double-stranded RNA. In one embodiment, the DNA is located between two root-specific promoters, which enable transcription of the DNA in opposite directions, resulting in the formation of dsRNA.

[0120] In some embodiments the recombinant DNA construct comprises other DNA elements in addition to the heterologous promoter operably linked to DNA comprising at least one segment of 18 or more contiguous nucleotides with a sequence of about 95% to about 100% identity with a fragment of equivalent length of a DNA having a sequence selected from the Target Gene Sequences Group or the DNA complement thereof. Such DNA elements are known in the art, and include but are not limited to introns, recombinase recognition sites, aptamers or ribozymes, additional and additional expression cassettes for expressing coding sequences (e.g., to express a transgene such as an insecticidal protein or selectable marker) or non-coding sequences (e.g., to express additional suppression elements). Inclusion of one or more recognition sites for binding and cleavage by a small RNA (e.g., by a miRNA or an siRNA that is expressed only in a particular cell or tissue) allows for more precise expression patterns in a plant, wherein the expression of the recombinant DNA construct is suppressed where the small RNA is expressed.

[0121] In some embodiments, the recombinant DNA construct is provided in a recombinant vector. By “recombinant vector” is meant a recombinant polynucleotide molecule that is used to transfer genetic information from one cell to another. Embodiments suitable to this invention include, but are not limited to, recombinant plasmids, recombinant cosmids, artificial chromosomes, and recombinant viral vectors such as recombinant plant virus vectors and recombinant baculovirus vectors. Alternative embodiments include recombinant plasmids, recombinant cosmids, artificial chromosomes, and recombinant viral vectors such as recombinant plant virus vectors and recombinant baculovirus vectors comprising the DNA element without the heterologous promoter.

[0122] In some embodiments, the recombinant DNA construct is provided in a plant chromosome or plastid, e.g., in a transgenic plant cell or a transgenic plant. Thus, also encompassed by this invention is a transgenic plant cell having in its genome the recombinant DNA construct, as well as a transgenic plant or partially transgenic plant including such a transgenic plant cell. Partially transgenic plants include, e.g., a non-transgenic scion grafted onto a transgenic rootstock including the transgenic plant cell. Embodiments include a transgenic tomato rootstock including the transgenic plant cell. The plant can be any plant that is subject to infestation by a Lepidopteran pest. Of particular interest are embodiments wherein the plant is a crop plant. Embodiments include those wherein the plant is an ungerminated crop plant seed, a crop plant in a vegetative stage, or a crop plant in a reproductive stage. Embodiments include those wherein the plant is a “seed potato”, meaning a potato tuber or piece of potato tuber which can be propagated into new potato plants. In yet another aspect, this invention is directed to seed (especially transgenic progeny seed) produced by the transgenic plant having in its genome a recombinant DNA construct as described herein. Embodiments also encompass a transgenic seed potato having in its genome a recombinant DNA construct as described herein. Also contemplated is a commodity product produced by such a transgenic plant, and a commodity product produced from the transgenic progeny seed of such a transgenic plant.

[0123] The recombinant DNA construct can be provided in a composition for topical application to a surface of a plant or of a plant seed, or for topical application to any substrate needing protection from a Lepidopteran pest infestation. Likewise, the recombinant DNA construct can be provided in a composition for topical application to a Lepidopteran pest, or in a composition for ingestion by a Lepidopteran pest. In various embodiments, such compositions containing the recombinant DNA construct are provided in the form of at least one selected from the group consisting of a solid, liquid (including homogeneous mixtures such as solutions and non-homogeneous mixtures such as suspensions, colloids, micelles, and emulsions), powder, suspension, emulsion, spray, encapsulated or micro-encapsulation formulation, in or on microbeads or other carrier particulates, in a film or coating, or on or within a matrix, or as a seed treatment. The topical application can be in the form of topical treatment of fruits of solanaceous plants or seeds from fruits of solanaceous plants, or in the form of topical treatment of “seed potato” tubers or pieces of tuber (e.g., by soaking, coating, or dusting the seed potato). Suitable binders, inert carriers, surfactants, and the like can be included in the composition containing the recombinant DNA construct, as is known to one skilled in formulation of pesticides and seed treatments. In some embodiments, the composition for topical application containing the recombinant DNA construct is at least one topically implantable formulation selected from the group consisting of a particulate, pellet, or capsule topically implanted in the plant; in such embodiments the method comprises topically implanting in the plant the topically implantable formulation. In some embodiments, the composition for topical application containing the recombinant DNA construct is at least one in-furrow formulation selected from the group consisting of a powder, granule, pellet, capsule, spray, or drench, or any other forms suited for topically applying to a furrow; in such embodiments, the method includes an in-furrow treatment with the in-furrow formulation. In one embodiment the composition for topical application containing the recombinant DNA construct can be ingested or otherwise absorbed internally by the Lepidopteran pest. For example, the composition for topical application containing the recombinant DNA construct can be in the form of bait. In some embodiments, the composition containing the recombinant DNA construct further comprises one or more components selected from the group consisting of a carrier agent, a surfactant, a cationic lipid (such as that disclosed in Example 18 of U.S. patent application publication 2011/0296556, incorporated by reference herein), an organosilicone, an organosilicone surfactant, a polynucleotide herbicidal molecule, a non-polynucleotide herbicidal molecule, a non-polynucleotide pesticide, a safener, and an insect growth regulator. In one embodiment the composition containing the recombinant DNA construct further comprises a nonionic organosilicone surfactant such as SILWET® brand surfactants, e.g., SILWET L-77® brand surfactant having CAS Number 27306-78-1 and EPA Number: CAL.REG.NO. 5905-50073-AA, currently available from Momentive Performance Materials, Albany, N.Y. In some embodiments, the composition containing the recombinant DNA construct further comprises at least one pesticidal agent selected from the group consisting of a patatin, a plant lectin, a phytoecdysteroid, a phytoecdysteroid, a Bacillus thuringiensis insecticidal protein, a Xenorhabdus insecticidal protein, a Photorhabdus insecticidal protein, a Bacillus laterosporus insecticidal protein, and a Bacillus sphaericus insecticidal protein.

[0124] It is anticipated that the combination of certain recombinant DNA constructs as described herein (e.g., recombinant DNA constructs including the polynucleotide triggers described in the working Examples), whether transgenically expressed or topically applied, with one or more non-polynucleotide pesticidal agents, whether transgenically expressed or topically applied, will result in an enhanced improvement in prevention or control of Lepidopteran pest infestations, when compared to the effect obtained with the recombinant DNA constructs alone or the non-polynucleotide pesticidal agent alone. In an embodiment, a recombinant DNA construct for expressing one or more polynucleotides as well as one or more genes encoding a non-polynucleotide pesticidal agent selected from the group consisting of a patatin, a plant lectin, a phytoecdysteroid, a Bacillus thuringiensis insecticidal protein, a Xenorhabdus insecticidal protein, a Photorhabdus insecticidal protein, a Bacillus laterosporus insecticidal protein, and a Bacillus sphaericus insecticidal protein, is found to provide improved resistance to Lepidopteran pest infestations in plants expressing the recombinant DNA construct. An embodiment relates to a recombinant DNA construct for expressing an RNA comprising a segment having a sequence selected from the Trigger Sequences Group as well as one or more genes encoding a non-polynucleotide pesticidal agent selected from the group consisting of a patatin, a plant lectin, a phytoecdysteroid, a Bacillus thuringiensis insecticidal protein, a Xenorhabdus insecticidal protein, a Photorhabdus insecticidal protein, a Bacillus laterosporus insecticidal protein, and a Bacillus sphaericus insecticidal protein.

[0125] The composition containing the recombinant DNA construct can be provided for dietary uptake by a Lepidopteran pest by applying the composition to a plant or surface subject to infestation by the Lepidopteran pest, for example by spraying, dusting, or coating the plant, or by application of a soil drench, or by providing in an artificial diet. The composition containing the recombinant DNA construct can be provided for dietary uptake by a Lepidopteran pest in an artificial diet formulated to meet the particular nutritional requirements for maintaining the Lepidopteran pest, wherein the artificial diet is supplemented with some amount of the recombinant DNA construct obtained from a separate source such as in vitro synthesis or purified from a microbial fermentation or other biological source; this embodiment can be useful, e.g., for determining the timing and amounts of effective treatment regimes. In some embodiments the composition containing the recombinant DNA construct is provided for dietary uptake by the Lepidopteran pest in the form of a plant cell or in plant cell components, or in a microorganism (such as a bacterium or a yeast) or a microbial fermentation product, or in a synthetic diet. In one embodiment the composition containing the recombinant DNA construct is provided in the form of bait that is ingested by the Lepidopteran pest. The composition containing the recombinant DNA construct can be provided for dietary uptake by the Lepidopteran pest in the form of a seed treatment.

[0126] In various embodiments, the composition containing the recombinant DNA construct comprises a microbial cell or is produced in a microorganism. For example, the composition for containing the recombinant DNA construct can include or can be produced in bacteria or yeast cells. In similar embodiments the composition containing the recombinant DNA construct comprises a transgenic plant cell or is produced in a plant cell (for example a plant cell transiently expressing the recombinant DNA construct); such plant cells can be cells in an plant or cells grown in tissue culture or in cell suspension.

### IX. Transgenic Plant Cells

[0127] Several embodiments relate to transgenic crop plant cells expressing a polynucleotide useful in the methods described herein for suppressing expression of a target gene in a Lepidopteran pest or for controlling a Lepidopteran infestation. In one aspect this invention provides a transgenic solanaceous plant cell having in its genome a recombinant DNA encoding RNA comprising at least one segment of 18 or more contiguous nucleotides with a sequence of about 95% to about 100% identity with a fragment of a DNA having a sequence selected from the Target Gene Sequences Group, the Trigger Sequences Group, or the DNA complement of any thereof. In one aspect this invention provides a transgenic solanaceous plant cell having in its genome a recombinant DNA encoding RNA comprising at least one silencing element essentially identical or essentially complementary to a fragment of a target gene sequence of the Lepidopteran pest larvae, wherein the target gene sequence is selected from the Target Gene Sequences Group, the Trigger Sequences Group, or the DNA complement of any thereof. In one aspect this invention provides a transgenic solanaceous plant cell having in its genome a recombinant DNA encoding RNA that suppresses expression of a target gene in a Lepidopteran pest that contacts or ingests the RNA, wherein the RNA comprises at least one silencing element having at least one segment of 18 or more contiguous nucleotides complementary to a fragment of the target gene, and wherein the target gene is selected from the group consisting of the genes in the Target Gene Sequences Group. A specific embodiment is a transgenic crop plant cell having in its genome a recombinant DNA encoding RNA that suppresses expression of a target gene in a Lepidopteran pest that contacts or ingests the RNA, wherein the RNA comprises at least one silencing element having at least one segment of 18 or more contiguous nucleotides complementary to a fragment of one or more Target Gene Sequences Group. In one aspect this invention provides a transgenic crop plant cell having in its genome a recombinant DNA encoding an RNA having a sequence selected from the Trigger Sequences Group. Such transgenic crop plant cells are useful in providing a transgenic crop plant having improved resistance to a Lepidopteran pest infestation when compared to a control plant lacking such plant cells. The transgenic crop plant cell can an isolated transgenic solanaceous plant cell, or a transgenic solanaceous plant cell grown in culture, or a transgenic cell of any transgenic crop plant that is subject to infestation by a Lepidopteran pest.

[0128] In an embodiment, the recombinant DNA is stably integrated into the transgenic crop plant's genome from where it can be expressed in a cell or cells of the transgenic solanaceous plant. Methods of providing stably transformed plants are provided in the section headed “Making and Using Transgenic Plant Cells and Transgenic Plants”.

[0129] Several embodiments relate to a transgenic solanaceous plant cell having in its genome a recombinant DNA encoding RNA that suppresses expression of a target gene in a Lepidopteran pest that contacts or ingests the RNA, wherein the RNA comprises at least one silencing element complementary to the target gene, and wherein the target gene sequence is selected from the Target Gene Sequences Group or the complement thereof. In some embodiments, the silencing element comprises at least one 18 or more contiguous nucleotides with a sequence of about 95% to about 100% complementarity to a fragment of equivalent length of a DNA having a sequence selected from the Target Gene Sequences Group, the Trigger Sequences Group, or the DNA complement of any thereof. In some embodiments, the silencing element comprises at least one 18 or more contiguous nucleotides capable of hybridizing in vivo or of hybridizing under physiological conditions (e.g., such as physiological conditions normally found in the cells of a Lepidopteran pest) to a fragment of equivalent length of a DNA having a sequence selected from the Target Gene Sequences Group, the Trigger Sequences Group, or the DNA complement of any thereof. The contiguous nucleotides number at least 18, e.g., between 18-24, or between 18-28, or between 20-30, or between 20-50, or between 20-100, or between 50-100, or between 50-500, or between 100-250, or between 100-500, or between 200-1000, or between 500-2000, or even greater. In some embodiments, the contiguous nucleotides number more than 18, e.g., 19, 20, 21, 22, 23, 24, 25, 26, 27, 28, 29, 30, or greater than 30, e.g., at least about 35, at least about 40, at least about 45, at least about 50, at least about 55, at least about 60, at least about 65, at least about 70, at least about 75, at least about 80, at least about 85, at least about 90, at least about 95, at least about 100, at least about 110, at least about 120, at least about 130, at least about 140, at least about 150, at least about 160, at least about 170, at least about 180, at least about 190, at least about 200, at least about 210, at least about 220, at least about 230, at least about 240, at least about 250, at least about 260, at least about 270, at least about 280, at least about 290, at least about 300, at least about 350, at least about 400, at least about 450, at least about 500, or greater than 500 contiguous nucleotides. In particular embodiments, the silencing element comprises at least one segment of at least 18, 19, 20, or 21 contiguous nucleotides with a sequence of 100% identity with a fragment of equivalent length of a DNA or target gene having a sequence selected from the Target Gene Sequences Group or the Trigger Sequences Group, or the DNA complement thereof. In particular embodiments, the RNA is a double-stranded nucleic acid (e.g., dsRNA) with one strand comprising at least one segment of at least 18, 19, 20, or 21 contiguous nucleotides with a sequence of 100% identity with a fragment of equivalent length of a DNA or target gene having a sequence selected from the Target Gene Sequences Group or the Trigger Sequences Group, or the DNA complement thereof; expressed as base-pairs, such a double-stranded nucleic acid comprises at least one segment of at least 18, 19, 20, or 21 contiguous, perfectly matched base-pairs which correspond to a fragment of equivalent length of a DNA or target gene having a sequence selected from the Target Gene Sequences Group or the Trigger Sequences Group, or the DNA complement thereof. In particular embodiments, each silencing element contained in the RNA is of a length greater than that which is typical of naturally occurring regulatory small RNAs. In some embodiments, each segment is at least about 30 contiguous nucleotides (or base-pairs) in length. In particular embodiments, the RNA is between about 50 to about 500 nucleotides in length. In particular embodiments, the RNA has a sequence selected from the Trigger Sequences Group.

[0130] In some embodiments, the transgenic crop plant cell is further capable expressing additional heterologous DNA sequences. In an embodiment, the transgenic solanaceous plant cell has a genome that further comprises recombinant DNA encoding at least one pesticidal agent selected from the group consisting of a patatin, a plant lectin, a phytoecdysteroid, a phytoecdysteroid, a Bacillus thuringiensis insecticidal protein, a Xenorhabdus insecticidal protein, a Photorhabdus insecticidal protein, a Bacillus laterosporus insecticidal protein, and a Bacillus sphaericus insecticidal protein. In particular embodiments, the transgenic crop plant cell has stably integrated in its genome (i) recombinant DNA encoding at least one RNA with a sequence selected from the Trigger Sequences Group and (ii) DNA encoding at least one pesticidal agent selected from the group consisting of a patatin, a plant lectin, a phytoecdysteroid, a phytoecdysteroid, a Bacillus thuringiensis insecticidal protein, a Xenorhabdus insecticidal protein, a Photorhabdus insecticidal protein, a Bacillus laterosporus insecticidal protein, and a Bacillus sphaericus insecticidal protein.

[0131] In a related aspect, this invention is directed to a transgenic crop plant including the transgenic crop plant cell, a commodity product produced from the transgenic crop plant, and transgenic progeny solanaceous plant seed or transgenic propagatable part of the transgenic solanaceous plant. Also contemplated is a commodity product produced by the transgenic crop plant, and a commodity product produced from the transgenic progeny seed of such a transgenic crop plant.

### X. Methods of Selecting Target Genes

[0132] Another aspect of this invention provides a method of non-random selection of target genes for RNAi-mediated silencing. In an embodiment, the method provides a subset of target genes that are present in single- or low-copy-number (non-repetitive and non-redundant) in a particular genome. Such target genes can be genes from a plant genome or genes from an animal genome. In some embodiments, the target genes are genes of an invertebrate pest, e.g. an invertebrate pest of a plant or an invertebrate pest of a vertebrate. In some embodiments, the target genes are genes of an insect pest of a plant or a nematode pest of a plant. In some embodiments, the target genes are genes of a Lepidopteran pest. Further aspects include manufacturing a polynucleotide (e.g., an ssRNA or dsRNA trigger, such as the dsRNA triggers described in the working Examples, or a recombinant DNA construct useful for making transgenic plants) based on target genes for RNAi-mediated silencing selected by any of the methods described herein.

[0133] In an embodiment, the method comprises the step of identifying single- or low-copy-number genes in the chosen genome, or alternatively to identify single- or low-copy-number genes in an orthologous database from related organisms to predict which genes will be single/low copy in the chosen organism. Low-copy genes, and in particular single-copy genes, are selected as targets for RNAi-mediated silencing. In one embodiment, the identification of single- or low-copy-number genes is carried out by sequence comparison between a set of genes from a first species and a set of genes from a second species, wherein the set of genes from a second species have been identified as single- or low-copy-number in the second species. In one embodiment, the identification of single- or low-copy-number genes is carried out by applying an algorithm performed by a computer to a set of genes from a first species to identify a subset of single- or low-copy-number genes in the set of genes from the first species, then comparing a set of genes from a second species to the subset of single- or low-copy-number genes from the first species to identify corresponding single- or low-copy-number genes from the second species. The single- or low-copy-number genes from the second species are useful as target genes for RNAi-mediated silencing; the sequences of these target genes are used for designing polynucleotides (e.g., an ssRNA or dsRNA trigger, such as the dsRNA triggers described in the working Examples, or recombinant DNA constructs for making transgenic plants) and methods of use thereof for preventing or controlling infestations by the second species. Another embodiment relates to identifying genes which are vital to the organism's survival by searching databases containing such information for model species orthologous to the target organism.

[0134] Embodiments of the method include a further step of estimating nucleotide diversity for low/single-copy genes in a population of the chosen organism and selecting those low-/single-copy genes that further have the lowest nucleotide diversity. Low-/single-copy genes that further have low nucleotide diversity are selected as targets for RNAi-mediated silencing. Another embodiment relates to identifying genes which are vital to the organism's survival by searching databases containing such information for model species orthologous to the target organism.

[0135] Embodiments of the method include a further step of comparing the ratio of synonymous (Kₛ) to nonsynonymous (Kₐ) nucleotide changes as an estimate of functional or evolutionary constraint. In an embodiment, the method comprises the step of selecting genes where Kₛ is at least equal to or greater than Kₐ. In an embodiment, the method comprises the step of selecting genes where Kₐ>>Kₐ.

[0136] A related aspect of this invention is a set of target genes for RNAi-mediated silencing identified from a genome by any of the gene selection methods described herein. An embodiment relates to a set of target genes for RNAi-mediated silencing selected from a genome by identifying single- or low-copy-number target genes from a larger set of genes from that genome. One embodiment relates to a set of target genes for RNAi-mediated silencing selected from an invertebrate genome by identifying single- or low-copy-number target genes from a larger set of genes from that invertebrate genome. A specific embodiment relates to a set of target genes for RNAi-mediated silencing in a Lepidopteran pest selected from a Lepidopteran genome by identifying single- or low-copy-number target genes from a larger set of genes from that Lepidopteran genome. A specific embodiment relates to a set of target genes for RNAi-mediated silencing in a Lepidopteran pest selected from a Lepidopteran genome by identifying single- or low-copy-number target genes from a larger set of genes from that Lepidopteran genome.

[0137] Another embodiment relates to a set of target genes for RNAi-mediated silencing selected from a genome by estimating nucleotide diversity for a given set of genes in a population of individuals of the pest having that genome, and selecting those genes that have the lowest nucleotide diversity. One embodiment relates to a set of target genes for RNAi-mediated silencing selected from an invertebrate genome by estimating nucleotide diversity for a given set of genes in a population of individuals of the invertebrate having that genome, and selecting those genes that have the lowest nucleotide diversity. Another embodiment relates to a set of target genes for RNAi-mediated silencing selected from an invertebrate genome by estimating nucleotide diversity for low-/single-copy genes in a population of individuals of the invertebrate having that genome, and selecting those low-/single-copy genes that further have the lowest nucleotide diversity.

[0138] Another embodiment relates to a set of target genes for RNAi-mediated silencing selected from a genome by comparing the ratio of synonymous (Kₛ) to nonsynonymous (Kₐ) nucleotide changes in genes of that genome and selecting genes where Kₛ is at least equal to or greater than Kₐ. In an embodiment, the set of target genes for RNAi-mediated silencing are genes where Kₛ is at least equal to or greater than Kₐ. In an embodiment, the set of target genes for RNAi-mediated silencing are genes where Kₛ>>Kₐ. An embodiment relates to a set of target genes for RNAi-mediated silencing selected from an invertebrate genome and where Kₛ>>Kₐ for the selected genes.

[0139] A further aspect of this invention are polyclonal or monoclonal antibodies that bind a protein encoded by a sequence or a fragment of a sequence selected from the group consisting of the Target Gene Sequences Group and polyclonal or monoclonal antibodies that bind a protein encoded by a sequence or a fragment of a sequence selected from the Trigger Sequences Group, or the complement thereof; such antibodies are made by routine methods as known to one of ordinary skill in the art, for example using routine protocols as described in “Antibody Methods and Protocols” (Proetzel and Ebersbach, editors, 2012, Humana Press, New York) or “Making and Using Antibodies” (Howard and Kaser, editors, 2006, CRC Press, Boca Raton).

### XI. Selection of Effective Polynucleotides by “Tiling”

[0140] Polynucleotides of use in the embodiments described herein need not be of the full length of a target gene, and in many embodiments are much shorter than the target gene. An example of a technique that is useful for selecting effective polynucleotides is “tiling”, or evaluation of polynucleotides corresponding to adjacent or partially overlapping segments of a target gene.

[0141] In some embodiments, effective polynucleotide triggers can be identified by “tiling” gene targets in selected length fragments, e.g., fragments of 200-300 nucleotides in length, with partially overlapping regions, e.g., of about 25 nucleotides, along the length of the target gene. In some embodiments, polynucleotide trigger sequences are designed to correspond to (have a nucleotide identity or complementarity with) regions that are unique to the target gene. In some embodiments, the selected region of the target gene can include coding sequence or non-coding sequence (e.g., promoter regions, 3′ untranslated regions, introns and the like) or a combination of both.

[0142] Where it is of interest to design a target effective in suppressing multiple target genes, the multiple target gene sequences are aligned and polynucleotide triggers are designed to correspond to regions with high sequence homology in common among the multiple targets. Conversely, where it is of interest to design a target effective in selectively suppressing one among multiple target sequences, the multiple target gene sequences are aligned and polynucleotide triggers designed to correspond to regions with no or low sequence homology in common among the multiple targets.

### XII. Thermodynamic Considerations in Selection of Effective Polynucleotides

[0143] In some embodiments, polynucleotide triggers can be designed or their sequence optimised using thermodynamic considerations. For example, polynucleotide triggers can be selected based on the thermodynamics controlling hybridization between one nucleic acid strand (e.g., a polynucleotide trigger or an individual siRNA) and another (e.g., a target gene transcript).

[0144] Methods and algorithms to predict nucleotide sequences that may be effective at RNAi-mediated silencing of a target gene are known in the art. Non-limiting examples of such methods and algorithms include “i-score”, described by Ichihara et al. (2007) Nucleic Acids Res., 35(18): 123e; “Oligowalk”, publicly available at rna.urmc.rochester.edu/servers/oligowalk and described by Lu et al. (2008) Nucleic Acids Res., 36:W104-108; and “Reynolds score”, described by Khovorova et al. (2004) Nature Biotechnol., 22:326-330, and “si-Fi”, described by Luck et al. (2019) Front. Plant Sci. publicly available at http://www.snowformatics.com/si-fi.html; and “SnapDragon”, described by Hu et al. (2016) Nucleic Acids Res., 45: D672-D678, publicly available at https://www.flyrnai.org/snapdragon; and “E-RNAi”, described by Horn et al. (2010) Nucleic Acids Res., 38: W332-W339, publicly available at https://www.dkfz.de/signaling/e-rnai3/.

### XIII. Permitted Mismatches

[0145] “Essentially identical” or “essentially complementary”, as used herein, means that a polynucleotide (or at least one strand of a double-stranded polynucleotide) has sufficient identity or complementarity to the target gene or to the RNA transcribed from a target gene (e.g., the transcript) to suppress expression of a target gene (e.g., to effect a reduction in levels or activity of the target gene transcript and/or encoded protein). Polynucleotides as described herein need not have 100 percent identity or complementarity to a target gene or sequence or to the RNA transcribed from a target gene to suppress expression of the target gene (e.g., to effect a reduction in levels or activity of the target gene transcript or encoded protein, or to provide control of a Lepidopteran pest). In some embodiments, the polynucleotide or a portion thereof is designed to be essentially identical to, or essentially complementary to, a sequence of at least 18 or 19 contiguous nucleotides in either the target gene or the RNA transcribed from the target gene. In some embodiments, the polynucleotide or a portion thereof is designed to be 100% identical to, or 100% complementary to, one or more sequences of 21 contiguous nucleotides in either the target gene or the RNA transcribed from the target gene. In certain embodiments, an “essentially identical” polynucleotide has 100 percent sequence identity or at least about 83, 84, 85, 86, 87, 88, 89, 90, 91, 92, 93, 94, 95, 96, 97, 98, or 99 percent sequence identity when compared to the sequence of 18 or more contiguous nucleotides in either the endogenous target gene or to an RNA transcribed from the target gene. In certain embodiments, an “essentially complementary” polynucleotide has 100 percent sequence complementarity or at least about 83, 84, 85, 86, 87, 88, 89, 90, 91, 92, 93, 94, 95, 96, 97, 98, or 99 percent sequence complementarity when compared to the sequence of 18 or more contiguous nucleotides in either the target gene or RNA transcribed from the target gene.

[0146] Sequence identity: The term “sequence identity” or “identity,” as used herein in the context of two polynucleotides or polypeptides, refers to the residues in the sequences of the two molecules that are the same when aligned for maximum correspondence over a specified comparison window.

[0147] As used herein, the term “percentage of sequence identity” may refer to the value determined by comparing two optimally aligned sequences (e.g., nucleic acid sequences or polypeptide sequences) of a molecule over a comparison window, wherein the portion of the sequence in the comparison window may comprise additions or deletions (i.e., gaps) as compared to the reference sequence (which does not comprise additions or deletions) for optimal alignment of the two sequences. The percentage is calculated by determining the number of positions at which the identical nucleotide or amino acid residue occurs in both sequences to yield the number of matched positions, dividing the number of matched positions by the total number of positions in the comparison window, and multiplying the result by 100 to yield the percentage of sequence identity. A sequence that is identical at every position in comparison to a reference sequence is said to be 100% identical to the reference sequence, and vice-versa. The term “about” with respect to a numerical value of a sequence length means the stated value with a +/−variance of up to 1-5 percent. For example, about 30 contiguous nucleotides means a range of 27-33 contiguous nucleotides, or any range in between. The term “about” with respect to a numerical value of percentage of sequence identity means the stated percentage value with a +/−variance of up to 1-3 percent rounded to the nearest integer. For example, about 90% sequence identity means a range of 87-93%. However, the percentage of sequence identity cannot exceed 100 percent. Thus, about 98% sequence identity means a range of 95-100%.

[0148] Polynucleotides containing mismatches to the target gene or transcript can be used in certain embodiments of the compositions and methods described herein. In some embodiments, the polynucleotide includes at least 18 or at least 19 or at least 21 contiguous nucleotides that are essentially identical or essentially complementary to a segment of equivalent length in the target gene or target gene's transcript. In certain embodiments, a polynucleotide of 18, 19, 20, or 21 or more contiguous nucleotides that is essentially identical or essentially complementary to a segment of equivalent length in the target gene or target gene's transcript can have 1 or 2 mismatches to the target gene or transcript (i.e., 1 or 2 mismatches between the polynucleotide's 21 contiguous nucleotides and the segment of equivalent length in the target gene or target gene's transcript). In certain embodiments, a polynucleotide of about 50, 100, 150, 200, 250, 300, 350 or more nucleotides that contains a contiguous 18, 19, 20, or 21 or more nucleotide span of identity or complementarity to a segment of equivalent length in the target gene or target gene's transcript can have 1 or 2 or more mismatches to the target gene or transcript.

[0149] In designing polynucleotides with mismatches to an endogenous target gene or to an RNA transcribed from the target gene, mismatches of certain types and at certain positions that are more likely to be tolerated can be used. In certain embodiments, mismatches formed between adenine and cytosine or guanosine and uracil residues are used as described by Du et al. (2005) Nucleic Acids Res., 33:1671-1677. In some embodiments, mismatches in 19 base-pair overlap regions are located at the low tolerance positions 5, 7, 8 or 11 (from the 5′ end of a 19-nucleotide target), at medium tolerance positions 3, 4, and 12-17 (from the 5′ end of a 19-nucleotide target), and/or at the high tolerance positions at either end of the region of complementarity, i.e., positions 1, 2, 18, and 19 (from the 5′ end of a 19-nucleotide target) as described by Du et al. (2005) Nucleic Acids Res., 33:1671-1677. Tolerated mismatches can be empirically determined in routine assays, e.g., in in vitro dietary assays on Lepidopteran pest larvae.

### XIV. Embedding Silencing Elements in Neutral Sequence

[0150] In some embodiments, a silencing element comprising a sequence corresponding to the target gene and which is responsible for an observed suppression of the target gene is embedded in “neutral” sequence, i.e., inserted into additional nucleotides that have no sequence identity or complementarity to the target gene. Neutral sequence can be desirable, e.g., to increase the overall length of a polynucleotide. For example, it can be desirable for a polynucleotide to be of a particular size for reasons of stability, cost-effectiveness in manufacturing, or biological activity. In some embodiments, neutral sequence is also useful in forming the loop in a hairpin trigger or as a spacer between trigger regions.

[0151] It has been reported that in another coleopteran species, Diabrotica virgifera, dsRNAs greater than or equal to approximately 60 base-pairs (bp) are required for biological activity in artificial diet bioassays; see Bolognesi et al. (2012) PLoS ONE 7(10): e47534. doi:10.1371/journal.pone.0047534. Thus, in one embodiment, a 21-base-pair dsRNA silencing element corresponding to a target gene in the Target Gene Sequences Group and found to provide control of a Lepidopteran infestation is embedded in neutral sequence of an additional 39 base pairs, thus forming a polynucleotide of about 60 base pairs. In some embodiments, the dsRNA trigger includes neutral sequence of between about 60 to about 500, or between 100 to about 450 base-pairs, in which is embedded at least one segment of 21 contiguous nucleotides with a sequence of 100% identity or 100% complementarity with a fragment of equivalent length of a target gene having a sequence selected from the Target Gene Sequences Group. In another embodiment, a single 21-base-pair silencing element with a sequence of 100% identity or 100% complementarity with a fragment of equivalent length of a target gene is found to be efficacious when embedded in larger sections of neutral sequence, e.g., where the total polynucleotide length is from about 60 to about 300 base pairs. In embodiments where the polynucleotide includes regions of neutral sequence, the polynucleotide will have relatively low overall sequence identity in comparison to the target gene; for example, a dsRNA with an overall length of 210 base-pairs, containing a single 21-base-pair trigger (of 100% identity or complementarity to a 21-nucleotide fragment of a target gene) embedded in an additional 189 base-pairs of neutral sequence, will have an overall sequence identity with the target gene of about 10%.

### XV. Insecticidal Double-Stranded RNA Molecules

[0152] Another aspect of this invention provides an insecticidal double-stranded RNA molecule that causes mortality or stunting of growth in a Lepidopteran pest when ingested or contacted by the Lepidopteran pest, wherein the insecticidal double-stranded RNA molecule comprises at least one segment of 18 or more contiguous nucleotides that is essentially identical or essentially complementary to a segment of equivalent length of a target gene or DNA (cDNA) having a sequence selected from The Target Gene Sequences Group. In some embodiments, the insecticidal double-stranded RNA molecule is between about 50 to about 500 base-pairs in length. In some embodiments, the insecticidal double-stranded RNA molecule comprises at least one segment of at least 30 contiguous nucleotides in length. In some embodiments, the insecticidal double-stranded RNA molecule comprises multiple segments of 18 or more contiguous nucleotides that are essentially identical or essentially complementary to a segment of equivalent length of a target gene or DNA (cDNA) having a sequence selected from The Target Gene Sequences Group, wherein the segments are from different regions of the target gene (e.g., the segments can correspond to different exon regions of the target gene, and “spacer” nucleotides which do not correspond to a target gene can optionally be used in between or adjacent to the segments), or are from different target genes. In some embodiments, the insecticidal double-stranded RNA molecule comprises multiple segments of 18 or more contiguous nucleotides that are essentially identical or essentially complementary to a segment of equivalent length of a target gene or DNA (cDNA) having a sequence selected from The Target Gene Sequences Group, wherein the segments are from different regions of the target gene and are arranged in the insecticidal double-stranded RNA molecule in an order different from the order in which the segments naturally occur in the target gene. In some embodiments, the insecticidal double-stranded RNA molecule comprises multiple segments each of 21 contiguous nucleotides with a sequence of 100% identity or 100% complementary to a segment of equivalent length of a target gene or DNA (cDNA) having a sequence selected from The Target Gene Sequences Group, wherein the segments are from different regions of the target gene and are arranged in the insecticidal double-stranded RNA molecule in an order different from the order in which the segments naturally occur in the target gene. In some embodiments, the insecticidal double-stranded RNA molecule comprises one strand comprising a sequence selected from the Trigger Sequences Group, or the complement thereof. The insecticidal double-stranded RNA molecule can be topically applied to a plant to control or prevent infestation by a Lepidopteran pest. The insecticidal double-stranded RNA molecule can be provided in a form suitable for ingestion or direct contact by a Lepidopteran pest, e.g., in the form of a spray or powder or bait. Other methods and suitable compositions for providing the insecticidal double-stranded RNA molecule are similar to those described in the preceding paragraphs for other aspects of this invention.

[0153] Several embodiments relate to a tank mixture comprising one or more insecticidal polynucleotides and water or other solvent, optionally including a cationic lipid or an organosilicone surfactant or both. Embodiments include tank mixture formulations of the polynucleotide and optionally at least one pesticidal agent selected from the group consisting of a patatin, a plant lectin, a phytoecdysteroid, a Bacillus thuringiensis insecticidal protein, a Xenorhabdus insecticidal protein, a Photorhabdus insecticidal protein, a Bacillus laterosporus insecticidal protein, and a Bacillus sphaericus insecticidal protein. Embodiments of such compositions include those where one or more insecticidal polynucleotides are provided in a living or dead microorganism such as a bacterium or fungal or yeast cell, or provided as a microbial fermentation product, or provided in a living or dead plant cell, or provided as a synthetic recombinant polynucleotide. In an embodiment the composition includes a non-pathogenic strain of a microorganism that contains a polynucleotide as described herein; ingestion or intake of the microorganism results in stunting or mortality of the Lepidopteran pest; non-limiting examples of suitable microorganisms include E. coli, B. thuringiensis, Pseudomonas sp., Photorhabdus sp., Xenorhabdus sp., Serratia entomophila and related Serratia sp., B. sphaericus, B. cereus, B. laterosporus, B. popilliae, Clostridium bifermentans and other Clostridium species, or other spore-forming gram-positive bacteria. In an embodiment, the composition includes a plant virus vector comprising a polynucleotide as described herein; feeding by a Lepidopteran pest on a plant treated with the plant virus vector results in stunting or mortality of the Lepidopteran pest. In an embodiment, the composition includes a baculovirus vector including a polynucleotide as described herein; ingestion or intake of the vector results in stunting or mortality of the Lepidopteran pest. In an embodiment, a polynucleotide as described herein is encapsulated in a synthetic matrix such as a polymer or attached to particulates and topically applied to the surface of a plant; feeding by a Lepidopteran pest on the topically treated plant results in stunting or mortality of the Lepidopteran pest. In an embodiment, a polynucleotide as described herein is provided in the form of a plant cell (e.g., a transgenic solanaceous plant cell of this invention) expressing the polynucleotide; ingestion of the plant cell or contents of the plant cell by a Lepidopteran pest results in stunting or mortality of the Lepidopteran pest.

[0154] In some embodiments, one or more polynucleotides as described herein are provided with appropriate stickers and wetters required for efficient foliar coverage as well as UV protectants to protect polynucleotides such as dsRNAs from UV damage. Such additives are commonly used in the bioinsecticide industry and are known to those skilled in the art. Compositions for soil application can include granular formulations that serve as bait for Lepidopteran pest larvae. In some embodiments, one or more polynucleotides as described herein are further provided with a carrier agent, a surfactant, a cationic lipid (such as that disclosed in Example 18 of U.S. patent application publication 2011/0296556, incorporated by reference herein), an organosilicone, an organosilicone surfactant, a polynucleotide herbicidal molecule, a non-polynucleotide herbicidal molecule, a non-polynucleotide pesticide, a safener, and an insect growth regulator. In some embodiments, the composition further includes at least one pesticidal agent selected from the group consisting of a patatin, a plant lectin, a phytoecdysteroid, a Bacillus thuringiensis insecticidal protein, a Xenorhabdus insecticidal protein, a Photorhabdus insecticidal protein, a Bacillus laterosporus insecticidal protein, and a Bacillus sphaericus insecticidal protein.

[0155] Such compositions are applied in any convenient manner, e.g., by spraying or dusting the Lepidopteran pest directly, or spraying or dusting a plant or environment wherein prevention or control of infestation by that Lepidopteran pest is desired, or by applying a coating to a surface of a plant, or by applying a coating to a seed (or seed potato) in preparation for the seed's planting, or by applying a soil drench around roots of a plant for which prevention or control of infestation by that Lepidopteran pest is desired.

[0156] An effective amount of a polynucleotide as described herein is an amount sufficient to provide control of the Lepidopteran pest, or to prevent infestation by the Lepidopteran pest; determination of effective amounts of a polynucleotide are made using routine assays. While there is no upper limit on the concentrations and dosages of an insecticidal polynucleotide that can be useful in the methods and compositions provided herein, lower effective concentrations and dosages will generally be sought for efficiency and economy. Non-limiting embodiments of effective amounts of a polynucleotide include a range from about 10 nanograms per milliliter to about 100 micrograms per milliliter of a polynucleotide in a liquid form sprayed on a plant, or from about 10 milligrams per acre to about 100 grams per acre of polynucleotide applied to a field of plants, or from about 0.001 to about 0.1 microgram per milliliter of polynucleotide in an artificial diet for feeding the Lepidopteran pest. Where polynucleotides as described herein are topically applied to a plant, the concentrations can be adjusted in consideration of the volume of spray or treatment applied to plant leaves or other plant part surfaces, such as flower petals, stems, tubers, fruit, anthers, pollen, leaves, roots, or seeds. In one embodiment, a useful treatment for herbaceous plants using 25-mer polynucleotides as described herein is about 1 nanomole (nmol) of polynucleotides per plant, for example, from about 0.05 to 1 nmol polynucleotides per plant. Other embodiments for herbaceous plants include useful ranges of about 0.05 to about 100 nmol, or about 0.1 to about 20 nmol, or about 1 nmol to about 10 nmol of polynucleotides per plant. In certain embodiments, about 40 to about 50 nmol of a ssDNA polynucleotide are applied. In certain embodiments, about 0.5 nmol to about 2 nmol of a dsRNA is applied. In certain embodiments, a composition containing about 0.5 to about 2.0 milligrams per milliliter, or about 0.14 milligrams per milliliter of a dsRNA or an ssDNA (21-mer) is applied. In certain embodiments, a composition of about 0.5 to about 1.5 milligrams per milliliter of a dsRNA polynucleotide of this invention of about 50 to about 200 or more nucleotides is applied. In certain embodiments, about 1 nmol to about 5 nmol of a dsRNA of this invention is applied to a plant. In certain embodiments, the polynucleotide composition as topically applied to the plant contains at least one polynucleotide of this invention at a concentration of about 0.01 to about 10 milligrams per milliliter, or about 0.05 to about 2 milligrams per milliliter, or about 0.1 to about 2 milligrams per milliliter. Very large plants, trees, or vines can require correspondingly larger amounts of polynucleotides. When using long dsRNA molecules of this invention that can be processed into multiple oligonucleotides (e.g., multiple triggers encoded by a single recombinant DNA molecule of this invention), lower concentrations can be used. Non-limiting examples of effective polynucleotide treatment regimes include a treatment of between about 0.1 to about 1 nmol of polynucleotide molecule per plant, or between about 1 nmol to about 10 nmol of polynucleotide molecule per plant, or between about 10 nmol to about 100 nmol of polynucleotide molecule per plant.

[0157] In some embodiments, one or more polynucleotides is provided with a “transfer agent”, which is an agent that enables a topically applied polynucleotide to enter the cells of an organism. Such transfer agents can be incorporated as part of a composition comprising a polynucleotide as described herein, or can be applied prior to, contemporaneously with, or following application of the polynucleotide. In some embodiments, a transfer agent is an agent that improves the uptake of a polynucleotide of this invention by a Lepidopteran pest. In some embodiments, a transfer agent is an agent that conditions the surface of plant tissue, e.g., seeds, leaves, stems, roots, flowers, or fruits, to permeation by a polynucleotide into plant cells. In some embodiments, the transfer agent enables a pathway for a polynucleotide through cuticle wax barriers, stomata, and/or cell wall or membrane barriers into plant cells.

[0158] Suitable transfer agents include agents that increase permeability of the exterior of the organism or that increase permeability of cells of the organism to polynucleotides. Suitable transfer agents include a chemical agent, or a physical agent, or combinations thereof. Chemical agents for conditioning or transfer include (a) surfactants, (b) an organic solvent or an aqueous solution or aqueous mixtures of organic solvents, (c) oxidizing agents, (d) acids, (e) bases, (f) oils, (g) enzymes, or any combination thereof. In some embodiments, application of a polynucleotide and a transfer agent optionally includes an incubation step, a neutralization step (e.g., to neutralize an acid, base, or oxidizing agent, or to inactivate an enzyme), a rinsing step, or combinations thereof. Suitable transfer agents can be in the form of an emulsion, a reverse emulsion, a liposome, or other micellar-like composition, or can cause the polynucleotide to take the form of an emulsion, a reverse emulsion, a liposome, or other micellar-like composition. Embodiments of transfer agents include counter-ions or other molecules that are known to associate with nucleic acid molecules, e.g., inorganic ammonium ions, alkyl ammonium ions, lithium ions, polyamines such as spermine, spermidine, or putrescine, and other cations. Embodiments of transfer agents include organic solvents such as DMSO, DMF, pyridine, N-pyrrolidine, hexamethylphosphoramide, acetonitrile, dioxane, polypropylene glycol, or other solvents miscible with water or that dissolve phosphonucleotides in non-aqueous systems (such as is used in synthetic reactions). Embodiments of transfer agents include naturally derived or synthetic oils with or without surfactants or emulsifiers, e.g., plant-sourced oils, crop oils (such as those listed in the 9^{th} Compendium of Herbicide Adjuvants, publicly available on-line at herbicide.adjuvants.com), paraffinic oils, polyol fatty acid esters, or oils with short-chain molecules modified with amides or polyamines such as polyethyleneimine or N-pyrrolidine.

[0159] Embodiments of transfer agents include organosilicone preparations. For example, a suitable transfer agent is an organosilicone preparation that is commercially available as SILWET L-77® brand surfactant having CAS Number 27306-78-1 and EPA Number: CAL.REG.NO. 5905-50073-AA, and currently available from Momentive Performance Materials, Albany, N.Y. One embodiment includes a composition that comprises a polynucleotide and a transfer agent including an organosilicone preparation such as Silwet L-77 in the range of about 0.015 to about 2 percent by weight (wt percent) (e.g., about 0.01, 0.015, 0.02, 0.025, 0.03, 0.035, 0.04, 0.045, 0.05, 0.055, 0.06, 0.065, 0.07, 0.075, 0.08, 0.085, 0.09, 0.095, 0.1, 0.2, 0.3, 0.4, 0.5, 0.6, 0.7, 0.8, 0.9, 1.0, 1.1, 1.2, 1.3, 1.4, 1.5, 1.6, 1.7, 1.8, 1.9, 2.0, 2.1, 2.2, 2.3, 2.5 wt percent). One embodiment includes a composition that comprises a polynucleotide of this invention and a transfer agent including SILWET L-77® brand surfactant in the range of about 0.3 to about 1 percent by weight (wt percent) or about 0.5 to about 1%, by weight (wt percent).

[0160] Organosilicone compounds useful as transfer agents for use in this invention include, but are not limited to, compounds that include: (a) a trisiloxane head group that is covalently linked to, (b) an alkyl linker including, but not limited to, an n-propyl linker, that is covalently linked to, (c) a polyglycol chain, that is covalently linked to, (d) a terminal group. Trisiloxane head groups of such organosilicone compounds include, but are not limited to, heptamethyltrisiloxane. Alkyl linkers can include, but are not limited to, an n-propyl linker. Polyglycol chains include, but are not limited to, polyethylene glycol or polypropylene glycol. Polyglycol chains can comprise a mixture that provides an average chain length “n” of about “7.5”. In certain embodiments, the average chain length “n” can vary from about 5 to about 14. Terminal groups can include, but are not limited to, alkyl groups such as a methyl group. Organosilicone compounds useful as transfer agents include, but are not limited to, trisiloxane ethoxylate surfactants or polyalkylene oxide modified heptamethyl trisiloxane. An example of a transfer agent for use in this invention is Compound I:

[chemical structure]

polyalkyleneoxide heptamethyltrisiloxane, average n=7.5).
Organosilicone compounds useful as transfer agents are used, e.g., as freshly made concentrations in the range of about 0.015 to about 2 percent by weight (wt percent) (e.g., about 0.01, 0.015, 0.02, 0.025, 0.03, 0.035, 0.04, 0.045, 0.05, 0.055, 0.06, 0.065, 0.07, 0.075, 0.08, 0.085, 0.09, 0.095, 0.1, 0.2, 0.3, 0.4, 0.5, 0.6, 0.7, 0.8, 0.9, 1.0, 1.1, 1.2, 1.3, 1.4, 1.5, 1.6, 1.7, 1.8, 1.9, 2.0, 2.1, 2.2, 2.3, 2.5 wt percent).

[0161] Embodiments of transfer agents include one or more salts such as ammonium chloride, tetrabutylphosphonium bromide, and ammonium sulfate, provided in or used with a composition including a polynucleotide. In some embodiments, ammonium chloride, tetrabutylphosphonium bromide, and/or ammonium sulfate are used at a concentration of about 0.5% to about 5% (w/v), or about 1% to about 3% (w/v), or about 2% (w/v). In certain embodiments, the composition including a polynucleotide includes an ammonium salt at a concentration greater or equal to 300 millimolar. In certain embodiments, the composition including a polynucleotide includes an organosilicone transfer agent in a concentration of about 0.015 to about 2 percent by weight (wt percent) as well as ammonium sulfate at concentrations from about 80 to about 1200 mM or about 150 mM to about 600 mM.

[0162] Embodiments of transfer agents include a phosphate salt. Phosphate salts useful in a composition including a polynucleotide include, but are not limited to, calcium, magnesium, potassium, or sodium phosphate salts. In certain embodiments, a composition including a polynucleotide includes a phosphate salt at a concentration of at least about 5 millimolar, at least about 10 millimolar, or at least about 20 millimolar. In certain embodiments, a composition including a polynucleotide a phosphate salt in a range of about 1 mM to about 25 mM or in a range of about 5 mM to about 25 mM. In certain embodiments, the composition including a polynucleotide sodium phosphate at a concentration of at least about 5 millimolar, at least about 10 millimolar, or at least about 20 millimolar. In certain embodiments, a composition including a polynucleotide includes sodium phosphate at a concentration of about 5 millimolar, about 10 millimolar, or about 20 millimolar. In certain embodiments, a composition including a polynucleotide includes a sodium phosphate salt in a range of about 1 mM to about 25 mM or in a range of about 5 mM to about 25 mM. In certain embodiments, a composition including a polynucleotide includes a sodium phosphate salt in a range of about 10 mM to about 160 mM or in a range of about 20 mM to about 40 mM. In certain embodiments, a composition including a polynucleotide includes a sodium phosphate buffer at a pH of about 6.8.

[0163] Embodiments of transfer agents include surfactants and/or effective molecules contained therein. Surfactants and/or effective molecules contained therein include, but are not limited to, sodium or lithium salts of fatty acids (such as tallow or tallowamines or phospholipids) and organosilicone surfactants. In certain embodiments, a composition including a polynucleotide is formulated with counter-ions or other molecules that are known to associate with nucleic acid molecules. Non-limiting examples include, tetraalkyl ammonium ions, trialkyl ammonium ions, sulfonium ions, lithium ions, and polyamines such as spermine, spermidine, or putrescine. In certain embodiments, a composition including a polynucleotide is formulated with a non-polynucleotide herbicide e.g., glyphosate, auxin-like benzoic acid herbicides including dicamba, chloramben, and TBA, glufosinate, auxin-like herbicides including phenoxy carboxylic acid herbicide, pyridine carboxylic acid herbicide, quinoline carboxylic acid herbicide, pyrimidine carboxylic acid herbicide, and benazolin-ethyl herbicide, sulfonylureas, imidazolinones, bromoxynil, delapon, cyclohezanedione, protoporphyrinogen oxidase inhibitors, and 4-hydroxyphenyl-pyruvate-dioxygenase inhibiting herbicides. In certain embodiments, a composition including a polynucleotide is formulated with a non-polynucleotide pesticide, e.g., a patatin, a plant lectin, a phytoecdysteroid, a Bacillus thuringiensis insecticidal protein, a Xenorhabdus insecticidal protein, a Photorhabdus insecticidal protein, a Bacillus laterosporus insecticidal protein, and a Bacillus sphaericus insecticidal protein. In some embodiments, a composition including a polynucleotide and a non-polynucleotide pesticide provides enhanced improvement in prevention or control of Lepidopteran pest infestations, when compared to the effect obtained with the polynucleotide alone or the non-polynucleotide pesticide alone. In some embodiments, a composition comprising a double-stranded RNA with a strand having a sequence selected from the Trigger Sequences Group is combined with a non-polynucleotide pesticide (e.g., a patatin, a plant lectin, a phytoecdysteroid, a Bacillus thuringiensis insecticidal protein, a Xenorhabdus insecticidal protein, a Photorhabdus insecticidal protein, a Bacillus laterosporus insecticidal protein, and a Bacillus sphaericus insecticidal protein), wherein the combination is found to effect improved prevention or control of Lepidopteran pest infestations, when compared to the effect obtained with the double-stranded RNA alone or the non-polynucleotide pesticide alone.

### XVI. Related Techniques

[0164] Embodiments of the polynucleotides and nucleic acid molecules as described herein can include additional elements, such as promoters, small RNA recognition sites, aptamers or ribozymes, additional and additional expression cassettes for expressing coding sequences (e.g., to express a transgene such as an insecticidal protein or selectable marker) or non-coding sequences (e.g., to express additional suppression elements). For example, an aspect of this invention provides a recombinant DNA construct comprising a heterologous promoter operably linked to DNA comprising at least one segment of 18 or more contiguous nucleotides with a sequence of about 95% to about 100% identity with a fragment of equivalent length of a DNA having a sequence selected from the Target Gene Sequences Group or the Trigger Sequences Group, or the DNA complement thereof. Another aspect of the invention provides a recombinant DNA construct comprising a heterologous promoter operably linked to DNA encoding an RNA hairpin having an anti-sense region having a sequence, or a fragment of a sequence, selected from the group selected from the Trigger Sequences Group. In another embodiment, a recombinant DNA construct comprising a promoter operably linked to DNA encoding: (a) an RNA silencing element for suppressing a target gene selected from the Target Gene Sequences Group, and (b) an aptamer, is stably integrated into the plant's genome from where RNA transcripts including the RNA aptamer and the RNA silencing element are expressed in cells of the plant; the aptamer serves to guide the RNA silencing element to a desired location in the cell. In another embodiment, inclusion of one or more recognition sites for binding and cleavage by a small RNA (e.g., by a miRNA or an siRNA that is expressed only in a particular cell or tissue) allows for more precise expression patterns in a plant, wherein the expression of the recombinant DNA construct is suppressed where the small RNA is expressed. Such additional elements are described below.

### XVII. Promoters

[0165] Promoters of use in the invention are functional in the cell in which the construct is intended to be transcribed. Generally these promoters are heterologous promoters, as used in recombinant constructs, i.e., they are not in nature found to be operably linked to the other nucleic elements used in the constructs described herein. In various embodiments, the promoter is selected from the group consisting of a constitutive promoter, a spatially specific promoter, a temporally specific promoter, a developmentally specific promoter, and an inducible promoter. In many embodiments the promoter is a promoter functional in a plant, for example, a pol II promoter, a pol III promoter, a pol IV promoter, or a pol V promoter.

[0166] Non-constitutive promoters suitable for use with the recombinant DNA constructs of this invention include spatially specific promoters, temporally specific promoters, and inducible promoters. Spatially specific promoters can include organelle-, cell-, tissue-, or organ-specific promoters (e.g., a plastid-specific, a root-specific, a pollen-specific, or a seed-specific promoter for expression in plastids, roots, pollen, or seeds, respectively). In many cases a seed-specific, embryo-specific, aleurone-specific, or endosperm-specific promoter is especially useful. Temporally specific promoters can include promoters that tend to promote expression during certain developmental stages in a plant's growth cycle, or during different times of day or night, or at different seasons in a year. Inducible promoters include promoters induced by chemicals or by environmental conditions such as, but not limited to, biotic or abiotic stress (e.g., water deficit or drought, heat, cold, high or low nutrient or salt levels, high or low light levels, or pest or pathogen infection). MicroRNA promoters are useful, especially those having a temporally specific, spatially specific, or inducible expression pattern; examples of miRNA promoters, as well as methods for identifying miRNA promoters having specific expression patterns, are provided in U.S. Patent Application Publications 2006/0200878, 2007/0199095, and 2007/0300329, which are specifically incorporated herein by reference. An expression-specific promoter can also include promoters that are generally constitutively expressed but at differing degrees or “strengths” of expression, including promoters commonly regarded as “strong promoters” or as “weak promoters”.

[0167] Promoters of particular interest include the following examples: an opaline synthase promoter isolated from T-DNA of Agrobacterium; a cauliflower mosaic virus 35S promoter; enhanced promoter elements or chimeric promoter elements such as an enhanced cauliflower mosaic virus (CaMV) 35S promoter linked to an enhancer element (an intron from heat shock protein 70 of Zea mays); root specific promoters such as those disclosed in U.S. Pat. Nos. 5,837,848; 6,437,217 and 6,426,446; a maize L3 oleosin promoter disclosed in U.S. Pat. No. 6,433,252; a promoter for a plant nuclear gene encoding a plastid-localized aldolase disclosed in U.S. Patent Application Publication 2004/0216189; cold-inducible promoters disclosed in U.S. Pat. No. 6,084,089; salt-inducible promoters disclosed in U.S. Pat. No. 6,140,078; light-inducible promoters disclosed in U.S. Pat. No. 6,294,714; pathogen-inducible promoters disclosed in U.S. Pat. No. 6,252,138; and water deficit-inducible promoters disclosed in U.S. Patent Application Publication 2004/0123347 A1. All of the above-described patents and patent publications disclosing promoters and their use, especially in recombinant DNA constructs functional in plants are incorporated herein by reference.

[0168] Plant vascular- or phloem-specific promoters of interest include a roIC or roIA promoter of Agrobacterium rhizogenes, a promoter of a Agrobacterium tumefaciens T-DNA gene 5, the rice sucrose synthase RSs1 gene promoter, a Commelina yellow mottle badnavirus promoter, a coconut foliar decay virus promoter, a rice tungro bacilliform virus promoter, the promoter of a pea glutamine synthase GS3A gene, a invCD111 and invCD141 promoters of a potato invertase genes, a promoter isolated from Arabidopsis shown to have phloem-specific expression in tobacco by Kertbundit et al. (1991) Proc. Natl. Acad. Sci. USA., 88:5212-5216, a VAHOX1 promoter region, a pea cell wall invertase gene promoter, an acid invertase gene promoter from carrot, a promoter of a sulfate transporter gene Sultr1; 3, a promoter of a plant sucrose synthase gene, and a promoter of a plant sucrose transporter gene.

[0169] Promoters suitable for use with a recombinant DNA construct or polynucleotide of this invention include polymerase II (“pol II”) promoters and polymerase III (“pol III”) promoters. RNA polymerase II transcribes structural or catalytic RNAs that are usually shorter than 400 nucleotides in length, and recognizes a simple run of T residues as a termination signal; it has been used to transcribe siRNA duplexes (see, e.g., Lu et al. (2004) Nucleic Acids Res., 32:e171). Pol II promoters are therefore in certain embodiments where a short RNA transcript is to be produced from a recombinant DNA construct of this invention. In one embodiment, the recombinant DNA construct comprises a pol II promoter to express an RNA transcript flanked by self-cleaving ribozyme sequences (e.g., self-cleaving hammerhead ribozymes), resulting in a processed RNA, such as a single-stranded RNA that binds to the transcript of the Lepidopteran target gene, with defined 5′ and 3′ ends, free of potentially interfering flanking sequences. An alternative approach uses pol III promoters to generate transcripts with relatively defined 5′ and 3′ ends, i.e., to transcribe an RNA with minimal 5′ and 3′ flanking sequences. In some embodiments, Pol III promoters (e.g., U6 or H1 promoters) are for adding a short AT-rich transcription termination site that results in 2 base-pair overhangs (UU) in the transcribed RNA; this is useful, e.g., for expression of siRNA-type constructs. Use of pol III promoters for driving expression of siRNA constructs has been reported; see van de Wetering et al. (2003) EMBO Rep., 4: 609-615, and Tuschl (2002) Nature Biotechnol., 20: 446-448. Baculovirus promoters such as baculovirus polyhedrin and p10 promoters are known in the art and commercially available; see, e.g., Invitrogen's “Guide to Baculovirus Expression Vector Systems (BEVS) and Insect Cell Culture Techniques”, 2002 (Life Technologies, Carlsbad, Calif.) and F. J. Haines et al. “Baculovirus Expression Vectors”, undated (Oxford Expression Technologies, Oxford, UK).

[0170] The promoter element can include nucleic acid sequences that are not naturally occurring promoters or promoter elements or homologues thereof but that can regulate expression of a gene. Examples of such “gene independent” regulatory sequences include naturally occurring or artificially designed RNA sequences that include a ligand-binding region or aptamer (see “Aptamers”, below) and a regulatory region (which can be cis-acting). See, for example, Isaacs et al. (2004) Nat. Biotechnol., 22:841-847, Bayer and Smolke (2005) Nature Biotechnol., 23:337-343, Mandal and Breaker (2004) Nature Rev. Mol. Cell Biol., 5:451-463, Davidson and Ellington (2005) Trends Biotechnol., 23:109-112, Winkler et al. (2002) Nature, 419:952-956, Sudarsan et al. (2003) RNA, 9:644-647, and Mandal and Breaker (2004) Nature Struct. Mol. Biol., 11:29-35. Such “riboregulators” could be selected or designed for specific spatial or temporal specificity, for example, to regulate translation of DNA that encodes a silencing element for suppressing a Lepidopteran target gene only in the presence (or absence) of a given concentration of the appropriate ligand. One example is a riboregulator that is responsive to an endogenous ligand (e.g., jasmonic acid or salicylic acid) produced by the plant when under stress (e.g., abiotic stress such as water, temperature, or nutrient stress, or biotic stress such as attach by pests or pathogens); under stress, the level of endogenous ligand increases to a level sufficient for the riboregulator to begin transcription of the DNA that encodes a silencing element for suppressing a Lepidopteran target gene.

### XVIII. Recombinase Sites

[0171] In some embodiments, the recombinant DNA construct or polynucleotide of this invention comprises DNA encoding one or more site-specific recombinase recognition sites. In one embodiment, the recombinant DNA construct comprises at least a pair of loxP sites, wherein site-specific recombination of DNA between the loxP sites is mediated by a Cre recombinase. The position and relative orientation of the loxP sites is selected to achieve the desired recombination; for example, when the loxP sites are in the same orientation, the DNA between the loxP sites is excised in circular form. In another embodiment, the recombinant DNA construct comprises DNA encoding one loxP site; in the presence of Cre recombinase and another DNA with a loxP site, the two DNAs are recombined.

### XIX. Aptamers

[0172] In some embodiments, the recombinant DNA construct or polynucleotide of this invention comprises DNA that is processed to an RNA aptamer, that is, an RNA that binds to a ligand through binding mechanism that is not primarily based on Watson-Crick base-pairing (in contrast, for example, to the base-pairing that occurs between complementary, anti-parallel nucleic acid strands to form a double-stranded nucleic acid structure). See, for example, Ellington and Szostak (1990) Nature, 346:818-822. Examples of aptamers can be found, for example, in the public Aptamer Database, available on line at aptamer.icmb.utexas.edu (Lee et al. (2004) Nucleic Acids Res., 32(1):D95-100). Aptamers useful in the invention can, however, be monovalent (binding a single ligand) or multivalent (binding more than one individual ligand, e.g., binding one unit of two or more different ligands).

[0173] Ligands useful in the invention include any molecule (or part of a molecule) that can be recognized and be bound by a nucleic acid secondary structure by a mechanism not primarily based on Watson-Crick base pairing. In this way, the recognition and binding of ligand and aptamer is analogous to that of antigen and antibody, or of biological effector and receptor. Ligands can include single molecules (or part of a molecule), or a combination of two or more molecules (or parts of a molecule), and can include one or more macromolecular complexes (e.g., polymers, lipid bilayers, liposomes, cellular membranes or other cellular structures, or cell surfaces). Examples of specific ligands include vitamins such as coenzyme B12 and thiamine pyrophosphate, flavin mononucleotide, guanine, adenosine, S-adenosylmethionine, S-adenosylhomocysteine, coenzyme A, lysine, tyrosine, dopamine, glucosamine-6-phosphate, caffeine, theophylline, antibiotics such as chloramphenicol and neomycin, herbicides such as glyphosate and dicamba, proteins including viral or phage coat proteins and invertebrate epidermal or digestive tract surface proteins, and RNAs including viral RNA, transfer-RNAs (t-RNAs), ribosomal RNA (rRNA), and RNA polymerases such as RNA-dependent RNA polymerase (RdRP). One class of RNA aptamers useful in the invention are “thermoswitches” that do not bind a ligand but are thermally responsive, that is to say, the aptamer's conformation is determined by temperature; see, for example, Box 3 in Mandal and Breaker (2004) Nature Rev. Mol. Cell Biol., 5:451-463.

### XX. Transgene Transcription Units

[0174] In some embodiments, the recombinant DNA construct or polynucleotide of this invention comprises a transgene transcription unit. A transgene transcription unit comprises DNA sequence encoding a gene of interest, e.g., a natural protein or a heterologous protein. A gene of interest can be any coding or non-coding sequence from any species (including, but not limited to, non-eukaryotes such as bacteria, and viruses; fungi, protists, plants, invertebrates, and vertebrates. Particular genes of interest are genes encoding at least one pesticidal agent selected from the group consisting of a patatin, a plant lectin, a phytoecdysteroid, a phytoecdysteroid, a Bacillus thuringiensis insecticidal protein, a Xenorhabdus insecticidal protein, a Photorhabdus insecticidal protein, a Bacillus laterosporus insecticidal protein, and a Bacillus sphaericus insecticidal protein. The transgene transcription unit can further include 5′ or 3′ sequence or both as required for transcription of the transgene.

### XXI. Introns

[0175] In some embodiments, the recombinant DNA construct or polynucleotide of this invention comprises DNA encoding a spliceable intron. By “intron” is generally meant a segment of DNA (or the RNA transcribed from such a segment) that is located between exons (protein-encoding segments of the DNA or corresponding transcribed RNA), wherein, during maturation of the messenger RNA, the intron present is enzymatically “spliced out” or removed from the RNA strand by a cleavage/ligation process that occurs in the nucleus in eukaryotes. The term “intron” is also applied to non-coding DNA sequences that are transcribed to RNA segments that can be spliced out of a maturing RNA transcript, but are not introns found between protein-coding exons. One example of these are spliceable sequences that that have the ability to enhance expression in plants (in some cases, especially in monocots) of a downstream coding sequence; these spliceable sequences are naturally located in the 5′ untranslated region of some plant genes, as well as in some viral genes (e.g., the tobacco mosaic virus 5′ leader sequence or “omega” leader described as enhancing expression in plant genes by Gallie and Walbot (1992) Nucleic Acids Res., 20:4631-4638). These spliceable sequences or “expression-enhancing introns” can be artificially inserted in the 5′ untranslated region of a plant gene between the promoter but before any protein-coding exons. Examples of such expression-enhancing introns include, but are not limited to, a maize alcohol dehydrogenase (Zm-Adh1), a maize Bronze-1 expression-enhancing intron, a rice actin 1 (Os-Act1) intron, a Shrunken-1 (Sh-1) intron, a maize sucrose synthase intron, a heat shock protein 18 (hsp18) intron, and an 82 kilodalton heat shock protein (hsp82) intron. U.S. Pat. Nos. 5,593,874 and 5,859,347, specifically incorporated by reference herein, describe methods of improving recombinant DNA constructs for use in plants by inclusion of an expression-enhancing intron derived from the 70 kilodalton maize heat shock protein (hsp70) in the non-translated leader positioned 3′ from the gene promoter and 5′ from the first protein-coding exon.

### XXII. Ribozymes

[0176] In some embodiments, the recombinant DNA construct or polynucleotide of this invention comprises DNA encoding one or more ribozymes. Ribozymes of particular interest include a self-cleaving ribozyme, a hammerhead ribozyme, or a hairpin ribozyme. In one embodiment, the recombinant DNA construct comprises DNA encoding one or more ribozymes that serve to cleave the transcribed RNA to provide defined segments of RNA, such as silencing elements for suppressing a Lepidopteran target gene.

### XXIII. Gene Suppression Elements

[0177] In some embodiments, the recombinant DNA construct or polynucleotide of this invention comprises DNA encoding additional gene suppression element for suppressing a target gene other than a Lepidopteran target gene. The target gene to be suppressed can include coding or non-coding sequence or both.

[0178] Suitable gene suppression elements are described in detail in U.S. Patent Application Publication 2006/0200878, which disclosure is specifically incorporated herein by reference, and include one or more of:
[0179] (a) DNA that comprises at least one anti-sense DNA segment that is anti-sense to at least one segment of the gene to be suppressed;
[0180] (b) DNA that comprises multiple copies of at least one anti-sense DNA segment that is anti-sense to at least one segment of the gene to be suppressed;
[0181] (c) DNA that comprises at least one sense DNA segment that is at least one segment of the gene to be suppressed;
[0182] (d) DNA that comprises multiple copies of at least one sense DNA segment that is at least one segment of the gene to be suppressed;
[0183] (e) DNA that transcribes to RNA for suppressing the gene to be suppressed by forming double-stranded RNA and comprises at least one anti-sense DNA segment that is anti-sense to at least one segment of the gene to be suppressed and at least one sense DNA segment that is at least one segment of the gene to be suppressed;
[0184] (f) DNA that transcribes to RNA for suppressing the gene to be suppressed by forming a single double-stranded RNA and comprises multiple serial anti-sense DNA segments that are anti-sense to at least one segment of the gene to be suppressed and multiple serial sense DNA segments that are at least one segment of the gene to be suppressed;
[0185] (g) DNA that transcribes to RNA for suppressing the gene to be suppressed by forming multiple double strands of RNA and comprises multiple anti-sense DNA segments that are anti-sense to at least one segment of the gene to be suppressed and multiple sense DNA segments that are at least one segment of the gene to be suppressed, and wherein the multiple anti-sense DNA segments and the multiple sense DNA segments are arranged in a series of inverted repeats;
[0186] (h) DNA that comprises nucleotides derived from a plant miRNA;
[0187] (i) DNA that comprises nucleotides of a siRNA;
[0188] (j) DNA that transcribes to an RNA aptamer capable of binding to a ligand; and
[0189] (k) DNA that transcribes to an RNA aptamer capable of binding to a ligand, and DNA that transcribes to regulatory RNA capable of regulating expression of the gene to be suppressed, wherein the regulation is dependent on the conformation of the regulatory RNA, and the conformation of the regulatory RNA is allosterically affected by the binding state of the RNA aptamer.

[0190] In some embodiments, an intron is used to deliver a gene suppression element in the absence of any protein-coding exons (coding sequence). In one example, an intron, such as an expression-enhancing intron, is interrupted by embedding within the intron a gene suppression element, wherein, upon transcription, the gene suppression element is excised from the intron. Thus, protein-coding exons are not required to provide the gene suppressing function of the recombinant DNA constructs disclosed herein.

### XXIV. Transcription Regulatory Elements

[0191] In some embodiments, the recombinant DNA construct or polynucleotide of this invention comprises DNA encoding a transcription regulatory element. Transcription regulatory elements include elements that regulate the expression level of the recombinant DNA construct of this invention (relative to its expression in the absence of such regulatory elements). Examples of suitable transcription regulatory elements include riboswitches (cis- or trans-acting), transcript stabilizing sequences, and miRNA recognition sites, as described in detail in U.S. Patent Application Publication 2006/0200878, specifically incorporated herein by reference.

### XXIV. Making and Using Transgenic Plant Cells and Transgenic Plants

[0192] Transformation of a plant can include any of several well-known methods and compositions. Suitable methods for plant transformation include virtually any method by which DNA can be introduced into a cell. One method of plant transformation is microprojectile bombardment, for example, as illustrated in U.S. Pat. No. 5,015,580 (soybean), U.S. Pat. No. 5,538,880 (maize), U.S. Pat. No. 5,550,318 (maize), U.S. Pat. No. 5,914,451 (soybean), U.S. Pat. No. 6,153,812 (wheat), U.S. Pat. No. 6,160,208 (maize), U.S. Pat. No. 6,288,312 (rice), U.S. Pat. No. 6,365,807 (rice), and U.S. Pat. No. 6,399,861 (maize), and U.S. Pat. No. 6,403,865 (maize), all of which are incorporated by reference for enabling the production of transgenic plants.

[0193] Another useful method of plant transformation is Agrobacterium-mediated transformation by means of Agrobacterium containing a binary Ti plasmid system, wherein the Agrobacterium carries a first Ti plasmid and a second, chimeric plasmid containing at least one T-DNA border of a wild-type Ti plasmid, a promoter functional in the transformed plant cell and operably linked to a polynucleotide or recombinant DNA construct of this invention. See, for example, the binary system described in U.S. Pat. No. 5,159,135, incorporated by reference. Also see De Framond (1983) Biotechnology, 1:262-269; and Hoekema et al., (1983) Nature, 303:179. In such a binary system, the smaller plasmid, containing the T-DNA border or borders, can be conveniently constructed and manipulated in a suitable alternative host, such as E. coli, and then transferred into Agrobacterium.

[0194] Detailed procedures for Agrobacterium-mediated transformation of plants, especially crop plants, include procedures disclosed in U.S. Pat. Nos. 5,004,863, 5,159,135, and 5,518,908 (cotton); U.S. Pat. Nos. 5,416,011, 5,569,834, 5,824,877 and 6,384,301 (soybean); U.S. Pat. Nos. 5,591,616 and 5,981,840 (maize); U.S. Pat. No. 5,463,174 (brassicas including canola), U.S. Pat. No. 7,026,528 (wheat), and U.S. Pat. No. 6,329,571 (rice), and in U.S. Patent Application Publications 2004/0244075 (maize) and 2001/0042257 A1 (sugar beet), all of which are specifically incorporated by reference for enabling the production of transgenic plants. U. S. Patent Application Publication 2011/0296555 discloses in Example 5 the transformation vectors (including the vector sequences) and detailed protocols for transforming maize, soybean, canola, cotton, and sugarcane) and is specifically incorporated by reference for enabling the production of transgenic plants. Similar methods have been reported for many plant species, both dicots and monocots, including, among others, peanut (Cheng et al. (1996) Plant Cell Rep., 15: 653); asparagus (Bytebier et al. (1987) Proc. Natl. Acad. Sci. U.S.A., 84:5345); barley (Wan and Lemaux (1994) Plant Physiol., 104:37); rice (Toriyama et al. (1988) Bio/Technology, 6:10; Zhang et al. (1988) Plant Cell Rep., 7:379; wheat (Vasil et al. (1992) Bio/Technology, 10:667; Becker et al. (1994) Plant J., 5:299), alfalfa (Masoud et al. (1996) Transgen. Res., 5:313); and tomato (Sun et al. (2006) Plant Cell Physiol., 47:426-431). See also a description of vectors, transformation methods, and production of transformed Arabidopsis thaliana plants where transcription factors are constitutively expressed by a CaMV35S promoter, in U. S. Patent Application Publication 2003/0167537 A1, incorporated by reference. Transformation methods specifically useful for solanaceous plants are well known in the art. See, for example, publicly described transformation methods for tomato (Sharma et al. (2009), J. Biosci., 34:423-433), eggplant (Arpaia et al. (1997) Theor. Appl. Genet., 95:329-334), potato (Bannerjee et al. (2006) Plant Sci., 170:732-738; Chakravarty et al. (2007) Amer. J. Potato Res., 84:301-311; S. Millam “Agrobacterium-mediated transformation of potato.” Chapter 19 (pp. 257-270), “Transgenic Crops of the World: Essential Protocols”, Ian S. Curtis (editor), Springer, 2004), and peppers (Li et al. (2003) Plant Cell Reports, 21: 785-788). Stably transgenic potato, tomato, and eggplant have been commercially introduced in various regions; see, e. g., K. Redenbaugh et al. “Safety Assessment of Genetically Engineered Fruits and Vegetables: A Case Study of the FLAVR SAVR Tomato”, CRC Press, Boca Raton, 1992, and the extensive publicly available documentation of commercial genetically modified crops in the GM Crop Database; see: CERA. (2012). GM Crop Database. Center for Environmental Risk Assessment (CERA), ILSI Research Foundation, Washington D.C., available electronically at cera-gmc.org/?action=gm_crop_database. Various methods of transformation of other plant species are well known in the art, see, for example, the encyclopedic reference, “Compendium of Transgenic Crop Plants”, edited by Chittaranjan Kole and Timothy C. Hall, Blackwell Publishing Ltd., 2008; ISBN 978-1-405-16924-0 (available electronically at mrw.interscience.wiley.com/emrw/9781405181099/hpt/toc), which describes transformation procedures for cereals and forage grasses (rice, maize, wheat, barley, oat, sorghum, pearl millet, finger millet, cool-season forage grasses, and bahiagrass), oilseed crops (soybean, oilseed brassicas, sunflower, peanut, flax, sesame, and safflower), legume grains and forages (common bean, cowpea, pea, faba bean, lentil, tepary bean, Asiatic beans, pigeonpea, vetch, chickpea, lupin, alfalfa, and clovers), temperate fruits and nuts (apple, pear, peach, plums, berry crops, cherries, grapes, olive, almond, and Persian walnut), tropical and subtropical fruits and nuts (citrus, grapefruit, banana and plantain, pineapple, papaya, mango, avocado, kiwifruit, passionfruit, and persimmon), vegetable crops (tomato, eggplant, peppers, vegetable brassicas, radish, carrot, cucurbits, alliums, asparagus, and leafy vegetables), sugar, tuber, and fiber crops (sugarcane, sugar beet, stevia, potato, sweet potato, cassava, and cotton), plantation crops, ornamentals, and turf grasses (tobacco, coffee, cocoa, tea, rubber tree, medicinal plants, ornamentals, and turf grasses), and forest tree species.

[0195] Transformation methods to provide transgenic plant cells and transgenic plants containing stably integrated recombinant DNA are preferably practiced in tissue culture on media and in a controlled environment. “Media” refers to the numerous nutrient mixtures that are used to grow cells in vitro, that is, outside of the intact living organism. Recipient cell targets include, but are not limited to, meristem cells, callus, immature embryos or parts of embryos, and gametic cells such as microspores, pollen, sperm, and egg cells. Any cell from which a fertile plant can be regenerated is contemplated as a useful recipient cell for practice of this invention. Callus can be initiated from various tissue sources, including, but not limited to, immature embryos or parts of embryos, seedling apical meristems, microspores, and the like. Those cells which are capable of proliferating as callus can serve as recipient cells for genetic transformation. Practical transformation methods and materials for making transgenic plants of this invention (e.g., various media and recipient target cells, transformation of immature embryos, and subsequent regeneration of fertile transgenic plants) are disclosed, for example, in U.S. Pat. Nos. 6,194,636 and 6,232,526 and U.S. Patent Application Publication 2004/0216189, which are specifically incorporated by reference.

[0196] In general transformation practice, DNA is introduced into only a small percentage of target cells in any one transformation experiment. Marker genes are generally used to provide an efficient system for identification of those cells that are stably transformed by receiving and integrating a transgenic DNA construct into their genomes. Preferred marker genes provide selective markers which confer resistance to a selective agent, such as an antibiotic or herbicide. Any of the antibiotics or herbicides to which a plant cell is resistant can be a useful agent for selection. Potentially transformed cells are exposed to the selective agent. In the population of surviving cells will be those cells where, generally, the resistance-conferring gene is integrated and expressed at sufficient levels to permit cell survival. Cells can be tested further to confirm stable integration of the recombinant DNA. Commonly used selective marker genes include those conferring resistance to antibiotics such as kanamycin or paromomycin (nptII), hygromycin B (aph IV) and gentamycin (aac3 and aacC4) or resistance to herbicides such as glufosinate (bar or pat) and glyphosate (EPSPS). Examples of useful selective marker genes and selection agents are illustrated in U.S. Pat. Nos. 5,550,318, 5,633,435, 5,780,708, and 6,118,047, all of which are specifically incorporated by reference. Screenable markers or reporters, such as markers that provide an ability to visually identify transformants can also be employed. Examples of useful screenable markers include, for example, a gene expressing a protein that produces a detectable color by acting on a chromogenic substrate (e.g., beta glucuronidase (GUS) (uidA) or luciferase (luc)) or that itself is detectable, such as green fluorescent protein (GFP) (gfp) or an immunogenic molecule. Those of skill in the art will recognize that many other useful markers or reporters are available for use.

[0197] Detecting or measuring transcription of a recombinant DNA construct in a transgenic plant cell can be achieved by any suitable method, including protein detection methods (e.g., western blots, ELISAs, and other immunochemical methods), measurements of enzymatic activity, or nucleic acid detection methods (e.g., Southern blots, northern blots, PCR, RT-PCR, fluorescent in situ hybridization).

[0198] Other suitable methods for detecting or measuring transcription in a plant cell of a recombinant polynucleotide of this invention targeting a Lepidopteran pest target gene include measurement of any other trait that is a direct or proxy indication of the level of expression of the target gene in the Lepidopteran pest, relative to the level of expression observed in the absence of the recombinant polynucleotide, e.g., growth rates, mortality rates, or reproductive or recruitment rates of the Lepidopteran pest, or measurements of injury (e.g., root injury) or yield loss in a plant or field of plants infested by the Lepidopteran pest. In general, suitable methods for detecting or measuring transcription in a plant cell of a recombinant polynucleotide of interest include, e.g., gross or microscopic morphological traits, growth rates, yield, reproductive or recruitment rates, resistance to pests or pathogens, or resistance to biotic or abiotic stress (e.g., water deficit stress, salt stress, nutrient stress, heat or cold stress). Such methods can use direct measurements of a phenotypic trait or proxy assays (e.g., in plants, these assays include plant part assays such as leaf or root assays to determine tolerance of abiotic stress). Such methods include direct measurements of resistance to an invertebrate pest or pathogen (e.g., damage to plant tissues) or proxy assays (e.g., plant yield assays, or bioassays such as the Western corn rootworm (Diabrotica virgifera virgifera LeConte) larval bioassay described in International Patent Application Publication WO2005/110068 A2 and U.S. Patent Application Publication US 2006/0021087 A1, specifically incorporated by reference, or the soybean cyst nematode bioassay described by Steeves et al. (2006) Funct. Plant Biol., 33:991-999, wherein cysts per plant, cysts per gram root, eggs per plant, eggs per gram root, and eggs per cyst are measured, or the Colorado potato beetle (Lepidopteran decemlineata) bioassay described herein in the working Examples.

[0199] The recombinant DNA constructs of this invention can be stacked with other recombinant DNA for imparting additional traits (e.g., in the case of transformed plants, traits including herbicide resistance, pest resistance, cold germination tolerance, water deficit tolerance, and the like) for example, by expressing or suppressing other genes. Constructs for coordinated decrease and increase of gene expression are disclosed in U.S. Patent Application Publication 2004/0126845 A1, specifically incorporated by reference.

[0200] Seeds of fertile transgenic plants can be harvested and used to grow progeny generations, including hybrid generations, of transgenic plants of this invention that include the recombinant DNA construct in their genome. Thus, in addition to direct transformation of a plant with a recombinant DNA construct of this invention, transgenic plants of this invention can be prepared by crossing a first plant having the recombinant DNA with a second plant lacking the construct. For example, the recombinant DNA can be introduced into a plant line that is amenable to transformation to produce a transgenic plant, which can be crossed with a second plant line to introgress the recombinant DNA into the resulting progeny. A transgenic plant of this invention can be crossed with a plant line having other recombinant DNA that confers one or more additional trait(s) (such as, but not limited to, herbicide resistance, pest or disease resistance, environmental stress resistance, modified nutrient content, and yield improvement) to produce progeny plants having recombinant DNA that confers both the desired target sequence expression behavior and the additional trait(s).

[0201] In such breeding for combining traits the transgenic plant donating the additional trait can be a male line (pollinator) and the transgenic plant carrying the base traits can be the female line. The progeny of this cross segregate such that some of the plant will carry the DNA for both parental traits and some will carry DNA for one parental trait; such plants can be identified by markers associated with parental recombinant DNA Progeny plants carrying DNA for both parental traits can be crossed back into the female parent line multiple times, e.g., usually 6 to 8 generations, to produce a homozygous progeny plant with substantially the same genotype as one original transgenic parental line as well as the recombinant DNA of the other transgenic parental line.

[0202] Yet another aspect of this invention is a transgenic plant grown from the transgenic seed (or in the case of potatoes, a transgenic seed potato) of this invention. This invention contemplates transgenic plants grown directly from transgenic seed containing the recombinant DNA as well as progeny generations of plants, including inbred or hybrid plant lines, made by crossing a transgenic plant grown directly from transgenic seed to a second plant not grown from the same transgenic seed. Crossing can include, for example, the following steps:
[0203] (a) plant seeds of the first parent plant (e.g., non-transgenic or a transgenic) and a second parent plant that is transgenic according to the invention;
[0204] (b) grow the seeds of the first and second parent plants into plants that bear flowers;
[0205] (c) pollinate a flower from the first parent with pollen from the second parent; and
[0206] (d) harvest seeds produced on the parent plant bearing the fertilized flower.

[0207] It is often desirable to introgress recombinant DNA into elite varieties, e.g., by backcrossing, to transfer a specific desirable trait from one source to an inbred or other plant that lacks that trait. This can be accomplished, for example, by first crossing a superior inbred (“A”) (recurrent parent) to a donor inbred (“B”) (non-recurrent parent), which carries the appropriate gene(s) for the trait in question, for example, a construct prepared in accordance with the current invention. The progeny of this cross first are selected in the resultant progeny for the desired trait to be transferred from the non-recurrent parent “B”, and then the selected progeny are mated back to the superior recurrent parent “A”. After five or more backcross generations with selection for the desired trait, the progeny can be essentially hemizygous for loci controlling the characteristic being transferred, but are like the superior parent for most or almost all other genes. The last backcross generation would be selfed to give progeny which are pure breeding for the gene(s) being transferred, e.g., one or more transformation events.

[0208] Through a series of breeding manipulations, a selected DNA construct can be moved from one line into an entirely different line without the need for further recombinant manipulation. One can thus produce inbred plants which are true breeding for one or more DNA constructs. By crossing different inbred plants, one can produce a large number of different hybrids with different combinations of DNA constructs. In this way, plants can be produced which have the desirable agronomic properties frequently associated with hybrids (“hybrid vigor”), as well as the desirable characteristics imparted by one or more DNA constructs.

[0209] In certain transgenic plant cells and transgenic plants of this invention, it is sometimes desirable to concurrently express a gene of interest while also modulating expression of a Lepidopteran target gene. Thus, in some embodiments, the transgenic plant contains recombinant DNA further comprising a gene expression element for expressing at least one gene of interest, and transcription of the recombinant DNA construct of this invention is effected with concurrent transcription of the gene expression element.

[0210] In some embodiments, the recombinant DNA constructs of this invention can be transcribed in any plant cell or tissue or in a whole plant of any developmental stage. Transgenic plants can be derived from any monocot or dicot plant, such as, but not limited to, plants of commercial or agricultural interest, such as crop plants (especially crop plants used for human food or animal feed), wood- or pulp-producing trees, vegetable plants, fruit plants, and ornamental plants. Examples of plants of interest include grain crop plants (such as wheat, oat, barley, maize, rye, triticale, rice, millet, sorghum, quinoa, amaranth, and buckwheat); forage crop plants (such as forage grasses and forage dicots including alfalfa, vetch, clover, and the like); oilseed crop plants (such as cotton, safflower, sunflower, soybean, canola, rapeseed, flax, peanuts, and oil palm); tree nuts (such as walnut, cashew, hazelnut, pecan, almond, and the like); sugarcane, coconut, date palm, olive, sugarbeet, tea, and coffee; wood- or pulp-producing trees; vegetable crop plants such as legumes (for example, beans, peas, lentils, alfalfa, peanut), lettuce, asparagus, artichoke, celery, carrot, radish, the brassicas (for example, cabbages, kales, mustards, and other leafy brassicas, broccoli, cauliflower, Brussels sprouts, turnip, kohlrabi), edible cucurbits (for example, cucumbers, melons, summer squashes, winter squashes), edible alliums (for example, onions, garlic, leeks, shallots, chives), edible members of the Solanaceae (for example, tomatoes, eggplants, potatoes, peppers, groundcherries), and edible members of the Chenopodiaceae (for example, beet, chard, spinach, quinoa, amaranth); fruit crop plants such as apple, pear, citrus fruits (for example, orange, lime, lemon, grapefruit, and others), stone fruits (for example, apricot, peach, plum, nectarine), banana, pineapple, grape, kiwifruit, papaya, avocado, and berries; plants grown for biomass or biofuel (for example, Miscanthus grasses, switchgrass, jatropha, oil palm, eukaryotic microalgae such as Botryococcus braunii, Chlorella spp., and Dunaliella spp., and eukaryotic macroalgae such as Gracilaria spp., and Sargassum spp.); and ornamental plants including ornamental flowering plants, ornamental trees and shrubs, ornamental groundcovers, and ornamental grasses.

[0211] This invention also provides commodity products produced from a transgenic plant cell, plant, or seed of this invention, including, but not limited to, harvested leaves, roots, shoots, tubers, stems, fruits, seeds, or other parts of a plant, meals, oils, extracts, fermentation or digestion products, crushed or whole grains or seeds of a plant, or any food or non-food product including such commodity products produced from a transgenic plant cell, plant, or seed of this invention. The detection of one or more of nucleic acid sequences of the recombinant DNA constructs of this invention in one or more commodity or commodity products contemplated herein is de facto evidence that the commodity or commodity product contains or is derived from a transgenic plant cell, plant, or seed of this invention.

[0212] Generally a transgenic plant having in its genome a recombinant DNA construct of this invention exhibits increased resistance to a Lepidopteran pest infestation. In various embodiments, for example, where the transgenic plant expresses a recombinant DNA construct of this invention that is stacked with other recombinant DNA for imparting additional traits, the transgenic plant has at least one additional altered trait, relative to a plant lacking the recombinant DNA construct, selected from the group of traits consisting of:
[0213] (a) improved abiotic stress tolerance;
[0214] (b) improved biotic stress tolerance;
[0215] (c) modified primary metabolite composition;
[0216] (d) modified secondary metabolite composition;
[0217] (e) modified trace element, carotenoid, or vitamin composition;
[0218] (f) improved yield;
[0219] (g) improved ability to use nitrogen, phosphate, or other nutrients;
[0220] (h) modified agronomic characteristics;
[0221] (i) modified growth or reproductive characteristics; and
[0222] (j) improved harvest, storage, or processing quality.

[0223] In some embodiments, the transgenic plant is characterized by: improved tolerance of abiotic stress (e.g., tolerance of water deficit or drought, heat, cold, non-optimal nutrient or salt levels, non-optimal light levels) or of biotic stress (e.g., crowding, allelopathy, or wounding); by a modified primary metabolite (e.g., fatty acid, oil, amino acid, protein, sugar, or carbohydrate) composition; a modified secondary metabolite (e.g., alkaloids, terpenoids, polyketides, non-ribosomal peptides, and secondary metabolites of mixed biosynthetic origin) composition; a modified trace element (e.g., iron, zinc), carotenoid (e.g., beta-carotene, lycopene, lutein, zeaxanthin, or other carotenoids and xanthophylls), or vitamin (e.g., tocopherols) composition; improved yield (e.g., improved yield under non-stress conditions or improved yield under biotic or abiotic stress); improved ability to use nitrogen, phosphate, or other nutrients; modified agronomic characteristics (e.g., delayed ripening; delayed senescence; earlier or later maturity; improved shade tolerance; improved resistance to root or stalk lodging; improved resistance to “green snap” of stems; modified photoperiod response); modified growth or reproductive characteristics (e.g., intentional dwarfing; intentional male sterility, useful, e.g., in improved hybridization procedures; improved vegetative growth rate; improved germination; improved male or female fertility); improved harvest, storage, or processing quality (e.g., improved resistance to pests during storage, improved resistance to breakage, improved appeal to consumers); or any combination of these traits.

[0224] In another embodiment, transgenic seed, or seed produced by the transgenic plant, has modified primary metabolite (e.g., fatty acid, oil, amino acid, protein, sugar, or carbohydrate) composition, a modified secondary metabolite composition, a modified trace element, carotenoid, or vitamin composition, an improved harvest, storage, or processing quality, or a combination of these. In another embodiment, it can be desirable to change levels of native components of the transgenic plant or seed of a transgenic plant, for example, to decrease levels of an allergenic protein or glycoprotein or of a toxic metabolite.

[0225] Generally, screening a population of transgenic plants each regenerated from a transgenic plant cell is performed to identify transgenic plant cells that develop into transgenic plants having the desired trait. The transgenic plants are assayed to detect an enhanced trait, e.g., enhanced water use efficiency, enhanced cold tolerance, increased yield, enhanced nitrogen use efficiency, enhanced seed protein, and enhanced seed oil. Screening methods include direct screening for the trait in a greenhouse or field trial or screening for a surrogate trait. Such analyses are directed to detecting changes in the chemical composition, biomass, physiological properties, or morphology of the plant. Changes in chemical compositions such as nutritional composition of grain are detected by analysis of the seed composition and content of protein, free amino acids, oil, free fatty acids, starch, tocopherols, or other nutrients. Changes in growth or biomass characteristics are detected by measuring plant height, stem diameter, internode length, root and shoot dry weights, and (for grain-producing plants such as maize, rice, or wheat) ear or seed head length and diameter. Changes in physiological properties are identified by evaluating responses to stress conditions, e.g., assays under imposed stress conditions such as water deficit, nitrogen or phosphate deficiency, cold or hot growing conditions, pathogen or insect attack, light deficiency, or increased plant density. Other selection properties include days to flowering, days to pollen shed, days to fruit maturation, fruit or tuber quality or amount produced, days to silking in maize, leaf extension rate, chlorophyll content, leaf temperature, stand, seedling vigor, internode length, plant height, leaf number, leaf area, tillering, brace roots, staying green, stalk lodging, root lodging, plant health, fertility, green snap, and pest resistance. In addition, phenotypic characteristics of harvested fruit, seeds, or tubers can be evaluated; for example, in tomato and eggplant this can include the total number or weight of fruit harvested or the color, acidity, sugar content, or flavor of such fruit, and in potato this can include the number or total weight of tubers harvested and the quality of such tubers.

[0226] The following Examples are presented for the purposes of illustration and should not be construed as limitations.

### EXAMPLES

### Identification of Target Genes

[0227] Target genes used for RNAi were identified by analyzing the target Lepidopteran pest's transcriptome for genes with desired nucleotide expression profiles at product-relevant tags and single- and low-copy numbers using publicly available data. Secondary confirmations on these were performed using literature searches and public databases such as Database of Essential Genes (DEG), iBeetle, Flybase, Lepbase etc. to assess their importance as RNAi targets. These genes were then nominated for design of dsRNA triggers

### Design of Efficacious Trigger Sequences

[0228] The identified target genes were then processed by a proprietary algorithm to be partitioned into all possible 18-25 bp long segments. These segments were then matched by the Burrows Wheeler Aligner (BWA) tool to the specific target genes' RNA sequence obtained from the respective publicly available transcriptome. These matching segments were then parsed to identify one or more subsequences of the target gene. Efficacious dsRNA triggers were then designed by combining then inputting these subsequences into proprietary algorithms and a variety of public dsRNA design tools such as Snapdragon, E-RNAi and SiFi21. Specificity of the designed triggers was then checked using BLAST and proprietary code for matches to species that were not targeted, and any hits from this analysis were re-designed using the methodology above.

TABLE 1A

| | Accession in Model | | | |
|---|---|---|---|---|
| Genes Targeted | Species | Target Species | Trigger ID | SEQ ID NO |
| PGRP | XM_011556718.1 | Plutella xylostella | GS144 | 115 |
| VATpaseE | NM_001305532.1 | Plutella xylostella | GS146 | 116 |
| ABCE | XM_011562286.1 | Plutella xylostella | GS148 | 117 |
| TH | NM_001305520.1 | Plutella xylostella | GS150 | 118 |
| Hemolin | FJ687752.1 | Plutella xylostella | GS152 | 119 |
| TH | MF440319.1 | Spodoptera | GS262 | 120 |
| | | frugiperda | | |
| Hemolin | XP_022819117.1 | [symbol] | GS263 | 121 |
| | | [symbol] | | |
| vATPasesubE | XP_030031453.1 | Spodoptera | GS264 | 122 |
| | | frugiperda | | |
| ABCE | XP_022815393.1 | [symbol] | GS265 | 123 |
| | | [symbol] | | |
| ABCE | XP_022815393.1 | Spodoptera | GS266 | 124 |
| | | frugiperda | | |
| IAP | AFA43941.1 | Spodoptera | GS267 | 125 |
| | | frugiperda | | |
| PGRP | XM_011556718.1 | Plutella xylostella | GS268 | 126 |
| vATPaseE | NM_001305532.1 | Plutella xylostella | GS269 | 127 |
| ABCE | XM_011562286.1 | Plutella xylostella | GS270 | 128 |
| TH | NM_001305520.1 | Plutella xylostella | GS271 | 129 |
| Hemolin | FJ687752.1 | Plutella xylostella | GS272 | 130 |
| IAP | AFA43941.1 | Plutella xylostella | GS273 | 131 |
| Proteasome beta | XM_022979686.1 | Spodoptera | GS297 | 132 |
| | | frugiperda | | |
| Rpll 140 | XM_022978887.1 | Spodoptera | GS298 | 133 |
| | | frugiperda | | |
| Rop (Ras opposite) | XM_022974274.1 | Spodoptera | GS299 | 134 |
| | | frugiperda | | |
| Voltage-gated potassium | XM_022966217.1 | [symbol] | GS300 | 135 |
| channel | | [symbol] | | |
| Rieske | XM_022965227.1 | Spodoptera | GS301 | 136 |
| | | frugiperda | | |
| Duox | XM_011560542.1 | Spodoptera | GS302 | 137 |
| | | frugiperda | | |
| Domeless | Px009358 | Spodoptera | GS303 | 138 |
| | | frugiperda | | |
| PPO | Px002274 | Spodoptera | GS304 | 139 |
| | | frugiperda | | |
| TAK1 | Px002003 | [symbol] | GS305 | 140 |
| | | [symbol] | | |
| Dred | Px000411 | [symbol] | GS306 | 141 |
| | | [symbol] | | |
| FADD | Px011635 | Spodoptera | GS307 | 142 |
| | | frugiperda | | |
| COPI beta′ coatomer | XM_011567740.1 | [symbol] | GS309 | 143 |
| | | [symbol] | | |
| Cactus | XM_011555277.1 | Spodoptera | GS311 | 144 |
| | | frugiperda | | |
| IKK-β | Px005490 | Spodoptera | GS313 | 145 |
| | | frugiperda | | |
| Tube | Px003725 | Spodoptera | GS314 | 146 |
| | | frugiperda | | |
| Imd | JQ710735.1 | Spodoptera | GS315 | 147 |
| | | frugiperda | | |
| PBAN | AY173075.1 | Spodoptera | GS316 | 148 |
| | | frugiperda | | |
| beta-1,3-glucan recognition | AY135522.1 | Spodoptera | GS317 | 149 |
| protein 2 | | frugiperda | | |
| Dred | Px000411 | Plutella xylostella | GS318 | 150 |
| TAK1 | Px002003 | Plutella xylostella | GS319 | 151 |
| PPO | Px002274 | Plutella xylostella | GS320 | 152 |
| Domeless | Px009358 | Plutella xylostella | GS321 | 153 |
| Duox | XM_011560542.1 | Plutella xylostella | GS322 | 154 |
| Rieske | XM_022965227.1 | Plutella xylostella | GS323 | 155 |
| Voltage-gated potassium | XM_022966217.1 | Plutella xylostella | GS324 | 156 |
| channel | | | | |
| Rop (Ras opposite) | XM_022974274.1 | Plutella xylostella | GS325 | 157 |
| Rpll 140 | XM_022978887.1 | Plutella xylostella | GS326 | 158 |
| Proteasome beta | XM_022979686.1 | Plutella xylostella | GS327 | 159 |
| beta-1,3-glucan recognition | AY135522.1 | Plutella xylostella | GS328 | 160 |
| protein 2 | | | | |
| PBAN | AY173075.1 | Plutella xylostella | GS329 | 161 |
| Imd | JQ710735.1 | Plutella xylostella | GS330 | 162 |
| Tube | Px003725 | Plutella xylostella | GS331 | 163 |
| IKK-β | Px005490 | Plutella xylostella | GS332 | 164 |
| FADD | Px011635 | Plutella xylostella | GS333 | 165 |
| ATF-2 | XM_011549568.1 | Plutella xylostella | GS334 | 166 |
| Cactus | XM_011555277.1 | Plutella xylostella | GS335 | 167 |
| p38 | XM_011563266.1 | Plutella xylostella | GS336 | 168 |
| COPI beta′ coatomer | XM_011567740.1 | Plutella xylostella | GS337 | 169 |
| Hopscotch | XM_011569785.1 | Plutella xylostella | GS338 | 170 |
| dorsal | AIA24466.1 | Spodoptera | GS440 | 171 |
| | | frugiperda | | |
| Kenny | dme:Dmel_CG16910 | Spodoptera | GS441 | 172 |
| | | frugiperda | | |
| Ankyrin | dme:Dmel_CG1651 | Spodoptera | GS442 | 173 |
| | | frugiperda | | |
| caspar | dme:Dmel_CG8400 | Spodoptera | GS443 | 174 |
| | | frugiperda | | |
| duf | TC002914 | Spodoptera | GS444 | 175 |
| | | frugiperda | | |
| htl | TC004713 | Spodoptera | GS445 | 176 |
| | | frugiperda | | |
| axed | NP_001356975.1 | Spodoptera | GS446 | 177 |
| | | frugiperda | | |
| Rbm24 | TC001720 | Spodoptera | GS447 | 178 |
| | | frugiperda | | |
| pirk | dme:Dmel_CG15678 | Spodoptera | GS448 | 179 |
| | | frugiperda | | |
| bendless | dme:Dmel_CG18319 | Spodoptera | GS449 | 180 |
| | | frugiperda | | |
| shadow | QCX08945.1 | Spodoptera | GS450 | 181 |
| | | frugiperda | | |
| ABCH1 | AKC96438.1 | Spodoptera | GS451 | 182 |
| | | frugiperda | | |
| Dumpy | NP_001260042.1 | Spodoptera | GS452 | 183 |
| | | frugiperda | | |
| dorsal | AIA24466.1 | Plutella xylostella | GS453 | 184 |
| Kenny | dme:Dmel_CG16910 | Plutella xylostella | GS454 | 185 |
| Ankyrin | dme:Dmel_CG1651 | Plutella xylostella | GS455 | 186 |
| caspar | dme:Dmel_CG8400 | Plutella xylostella | GS456 | 187 |
| duf | TC002914 | Plutella xylostella | GS457 | 188 |
| htl | TC004713 | Plutella xylostella | GS458 | 189 |
| axed | NP_001356975.1 | Plutella xylostella | GS459 | 190 |
| Rbm24 | TC001720 | Plutella xylostella | GS460 | 191 |
| pirk | dme:Dmel_CG15678 | Plutella xylostella | GS461 | 192 |
| bendless | dme:Dmel_CG18319 | Plutella xylostella | GS462 | 193 |
| shadow | QCX08945.1 | Plutella xylostella | GS463 | 194 |
| ABCH1 | AKC96438.1 | Plutella xylostella | GS464 | 195 |
| Dumpy | NP_001260042.1 | Plutella xylostella | GS465 | 196 |
| AK (arginine kinase) | AIY55683.1 | Spodoptera | GS466 | 197 |
| | | frugiperda | | |
| VHDL (very high density | XP_021195805.1 | Spodoptera | GS467 | 198 |
| lipoprotein) | | frugiperda | | |
| AK (arginine kinase) | AIY55683.1 | Plutella xylostella | GS468 | 199 |
| VHDL (very high density | XP_021195805.1 | Plutella xylostella | GS469 | 200 |
| lipoprotein) | | | | |
| diuretic hormone 31 | NP_523514.1 | [symbol] | GS470 | 201 |
| | | [symbol] | | |
| diuretic hormone 31 | NP_523514.1 | Plutella xylostella | GS471 | 202 |
| pre-mRNA splicing factor | XP_022820559.1 | Spodoptera | GS472 | 203 |
| | | frugiperda | | |
| PRGP-LE | dme:Dmel_CG8995 | Spodoptera | GS473 | 204 |
| | | frugiperda | | |
| COP I gamma | TC011806 | Spodoptera | GS474 | 205 |
| | | frugiperda | | |
| COP I zeta | NP_648910.1 | Spodoptera | GS475 | 206 |
| | | frugiperda | | |
| COP I beta prime | NP_524836.2 | Spodoptera | GS476 | 207 |
| | | frugiperda | | |
| COP I alpha | NP_477395.1 | Spodoptera | GS477 | 208 |
| | | frugiperda | | |
| COP I delta | NP_652012.1 | [symbol] | GS478 | 209 |
| | | [symbol] | | |
| COP I epsilon | NP_609037.1 | Spodoptera | GS479 | 210 |
| | | frugiperda | | |
| verm (vermiform) | TC014101 | Spodoptera | GS480 | 211 |
| | | frugiperda | | |
| kr-h1 (kruppel homolog 1) | TC006419 | Spodoptera | GS481 | 212 |
| | | frugiperda | | |
| Calcium-activated potassium | AAA28651.1 | [symbol] | GS482 | 213 |
| channel | | [symbol] | | |
| InR2 (insulin receptor 2) | ARD07922.1 | Spodoptera | GS483 | 214 |
| | | frugiperda | | |
| tubulin 2 | XP_021194879.1 | Spodoptera | GS484 | 215 |
| | | frugiperda | | |
| pre-mRNA splicing factor | XP_022820559.1 | Plutella xylostella | GS485 | 216 |
| COP I gamma | TC011806 | Plutella xylostella | GS486 | 217 |
| COP I zeta | NP_648910.1 | Plutella xylostella | GS487 | 218 |
| COP I beta prime | NP_524836.2 | Plutella xylostella | GS488 | 219 |
| COP I alpha | NP_477395.1 | Plutella xylostella | GS489 | 220 |
| COP I delta | NP_652012.1 | Plutella xylostella | GS490 | 221 |
| COP I epsilon | NP_609037.1 | Plutella xylostella | GS491 | 222 |
| verm (vermiform) | TC014101 | Plutella xylostella | GS492 | 223 |
| kr-h1 (kruppel homolog 1) | TC006419 | Plutella xylostella | GS493 | 224 |
| Calcium-activated potassium | AAA28651.1 | Plutella xylostella | GS494 | 225 |
| channel | | | | |
| InR2 (insulin receptor 2) | ARD07922.1 | Plutella xylostella | GS495 | 226 |
| tubulin 2 | XP_021194879.1 | Plutella xylostella | GS496 | 227 |
| PRGP-LE | dme:Dmel_CG8995 | Plutella xylostella | GS497 | 228 |

TABLE 1B

| | | Accession in Model | | |
|---|---|---|---|---|
| Target_species | Genes Targeted | Species | Universal_ID | SEQ ID NO. |
| Spodoptera | sd | TC032219 | GS921 | 362 |
| frugiperda | | | | |
| Spodoptera | Rfabg - Retinoid- and fatty acid-binding | TC034740 | GS985 | 363 |
| frugiperda | glycoprotein | | | |
| Spodoptera | Rpb7 | TC014109 | GS922 | 364 |
| frugiperda | | | | |
| Spodoptera | calypso | TC009963 | GS924 | 365 |
| frugiperda | | | | |
| Spodoptera | Rbm24 | TC001720 | GS917 | 366 |
| frugiperda | | | | |
| Spodoptera | twisted bristles roughened eye | TC000179 | GS919 | 367 |
| frugiperda | | | | |
| Spodoptera | surfeit 4 | TC000161 | GS923 | 368 |
| frugiperda | | | | |
| Spodoptera | Rpn7 regulatory particle non-ATPase 7 | TC006375 | GS925 | 369 |
| frugiperda | | | | |
| Spodoptera | how - held out wings | TC000827 | GS986 | 370 |
| frugiperda | | | | |
| Spodoptera | Phenylalanyl-tRNA synthetase beta subunit | TC032227 | GS926 | 371 |
| frugiperda | | | | |
| Spodoptera | twi | TC014598 | GS918 | 372 |
| frugiperda | | | | |
| Spodoptera | mbc | TC012454 | GS920 | 373 |
| frugiperda | | | | |
| Spodoptera | psc - posterior sex combs | TC005276 | GS868 | 374 |
| frugiperda | | | | |
| Spodoptera | Upf1 | TC000192 | GS872 | 375 |
| frugiperda | | | | |
| Spodoptera | sr | TC004846 | GS870 | 376 |
| frugiperda | | | | |
| Spodoptera | Fit1- Fit2 | TC010123 | GS867 | 377 |
| frugiperda | | | | |
| Spodoptera | RRM domain-containing protein | TC010637 | GS869 | 378 |
| frugiperda | | | | |
| Spodoptera | Tc croc | TC002813 | GS866 | 379 |
| frugiperda | | | | |
| Spodoptera | Protein kinase | TC000040 | GS877 | 380 |
| frugiperda | | | | |
| Spodoptera | Arp3 | TC002963 | GS876 | 381 |
| frugiperda | | | | |
| Spodoptera | Actin related protein 2 | TC000144 | GS878 | 382 |
| frugiperda | | | | |
| Spodoptera | TAR DNA-binding protein 43-like Protein | TC006055 | GS865 | 383 |
| frugiperda | | | | |
| Spodoptera | wb | TC014773 | GS884 | 384 |
| frugiperda | | | | |
| Spodoptera | TC004745 | TC004745 | GS987 | 385 |
| frugiperda | | | | |
| Spodoptera | ara | TC031040 | GS873 | 386 |
| frugiperda | | | | |
| Spodoptera | Mef2 | TC010850 | GS885 | 387 |
| frugiperda | | | | |
| Spodoptera | FA elongase | TC010977 | GS883 | 388 |
| frugiperda | | | | |
| Spodoptera | Uncharacterized protein | TC010693 | GS875 | 389 |
| frugiperda | | | | |
| Spodoptera | Translocase of inner mitochondrial | TC000047 | GS880 | 390 |
| frugiperda | membrane 23 | | | |
| Spodoptera | Pax2 | TC003570 | GS879 | 391 |
| frugiperda | | | | |
| Spodoptera | Vrp1 | TC012341 | GS871 | 392 |
| frugiperda | | | | |
| Spodoptera | dre4-CG1828 | TC014294 | GS882 | 393 |
| frugiperda | | | | |
| Spodoptera | Dhx15 | TC000481 | GS881 | 394 |
| frugiperda | | | | |
| Spodoptera | CG40470 (nearest homolog) | TC000165 | GS874 | 395 |
| frugiperda | | | | |
| Spodoptera | Rpl40 | FBgn0003941 | GS932 | 396 |
| frugiperda | | | | |
| Spodoptera | Rps21 | FBgn0015521 | GS942 | 397 |
| frugiperda | | | | |
| Spodoptera | RpL3 | FBgn0020910 | GS943 | 398 |
| frugiperda | | | | |
| Spodoptera | Vps28 | FBgn0021814 | GS944 | 399 |
| frugiperda | | | | |
| Spodoptera | Sec23A | FBgn0262125 | GS933 | 400 |
| frugiperda | | | | |
| Spodoptera | Sec6 | FBgn0266671 | GS934 | 401 |
| frugiperda | | | | |
| Spodoptera | vATPase-Vha26 | FBgn0283535 | GS945 | 402 |
| frugiperda | | | | |
| Spodoptera | Vps16A | FBgn0285911 | GS946 | 403 |
| frugiperda | | | | |
| Spodoptera | UEV1a | Dmel_CG10640 | GS935 | 404 |
| frugiperda | | | | |
| Spodoptera | relish | Dmel_CG11992 | GS936 | 405 |
| frugiperda | | | | |
| Spodoptera | diptericin | Dmel_CG12763 | GS979 | 406 |
| frugiperda | | | | |
| Spodoptera | spirit | Dmel_CG2056 | GS973 | 407 |
| frugiperda | | | | |
| Spodoptera | sphynx | Dmel_CG32382 | GS981 | 408 |
| frugiperda | | | | |
| Spodoptera | grass | Dmel_CG5896 | GS976 | 409 |
| frugiperda | | | | |
| Spodoptera | pelle | Dmel_CG5974 | GS974 | 410 |
| frugiperda | | | | |
| Spodoptera | DIF | Dmel_CG6667 | GS977 | 411 |
| frugiperda | | | | |
| Spodoptera | Effete | Dmel_CG7425 | GS980 | 412 |
| frugiperda | | | | |
| Spodoptera | spheroide | Dmel_CG9675 | GS968 | 413 |
| frugiperda | | | | |
| Spodoptera | Toll | Dmel_CG5490 | GS975 | 414 |
| frugiperda | | | | |
| Spodoptera | Tab2 | Dmel_CG7417 | GS966 | 415 |
| frugiperda | | | | |
| Spodoptera | caudal | NM_001273712 | GS971 | 416 |
| frugiperda | | | | |
| Spodoptera | methonine-rich storage protein (hexamerin | JF798635 | GS970 | 417 |
| frugiperda | homolog) | | | |
| Spodoptera | Insulin receptor 1 | KX507134 | GS978 | 418 |
| frugiperda | | | | |
| Spodoptera | Sh - Shaker | TC003580 | GS965 | 419 |
| frugiperda | | | | |
| Spodoptera | SK - small conductance calcium-activated | TC014196 | GS967 | 420 |
| frugiperda | potassium channel | | | |
| Spodoptera | chitinase1 | JQ653040 | GS982 | 421 |
| frugiperda | | | | |
| Spodoptera | ATPase | JQ653046 | GS972 | 422 |
| frugiperda | | | | |
| Spodoptera | Vacuolar ATPase A | KM591219 | GS969 | 423 |
| frugiperda | | | | |
| Spodoptera | methionine_rich_storage_protein | ABX55887.1 | GS1046 | 424 |
| frugiperda | | | | |
| Spodoptera | SK_gene | XP_008193517.1 | GS1026 | 425 |
| frugiperda | | | | |
| Spodoptera | troponin | AYD60125.1 | GS1048 | 426 |
| frugiperda | | | | |
| Spodoptera | P102 | AIE56154.1 | GS1045 | 427 |
| frugiperda | | | | |
| Spodoptera | vATPase | ADN84935.1 | GS1036 | 428 |
| frugiperda | | | | |
| Spodoptera | chitinase | AAS18266.1 | GS1044 | 429 |
| frugiperda | | | | |
| Plutella xylostella | sd | TC032219 | GS907 | 430 |
| Plutella xylostella | Rpb7 | TC014109 | GS910 | 431 |
| Plutella xylostella | calypso | TC009963 | GS914 | 432 |
| Plutella xylostella | Rbm24 | TC001720 | GS913 | 433 |
| [symbol] | twisted bristles roughened eye | TC000179 | GS909 | 434 |
| Plutella xylostella | surfeit 4 | TC000161 | GS912 | 435 |
| Plutella xylostella | Rpn7 | TC006375 | GS915 | 436 |
| Plutella xylostella | how | TC000827 | GS911 | 437 |
| Plutella xylostella | Phenylalanyl-tRNA synthetase beta subunit | TC032227 | GS916 | 438 |
| Plutella xylostella | twi | TC014598 | GS908 | 439 |
| Plutella xylostella | mbc | TC012454 | GS983 | 440 |
| Plutella xylostella | psc - posterior sex combs | TC005276 | GS899 | 441 |
| [symbol] | Upf1 | TC000192 | GS900 | 442 |
| Plutella xylostella | sr | TC004846 | GS894 | 443 |
| Plutella xylostella | Fit1-2 | TC010123 | GS897 | 444 |
| Plutella xylostella | RRM domain-containing protein | TC010637 | GS903 | 445 |
| Plutella xylostella | Tc croc | TC002813 | GS906 | 446 |
| Plutella xylostella | Protein kinase | TC000040 | GS889 | 447 |
| Plutella xylostella | Arp3 | TC002963 | GS904 | 448 |
| Plutella xylostella | Arp2 | TC000144 | GS895 | 449 |
| Plutella xylostella | TAR DNA-binding protein 43-like Protein | TC006055 | GS890 | 450 |
| [symbol] | wb | TC014773 | GS898 | 451 |
| [symbol] | Unknown | TC004745 | GS984 | 452 |
| [symbol] | ara | TC031040 | GS887 | 453 |
| [symbol] | Mef2 | TC010850 | GS901 | 454 |
| Plutella xylostella | FA elongase | TC010977 | GS902 | 455 |
| [symbol] | Uncharacterized protein | TC010693 | GS892 | 456 |
| [symbol] | Translocase of inner mitochondrial | TC000047 | GS905 | 457 |
| | membrane 23 | | | |
| Plutella xylostella | Pax2 | TC003570 | GS891 | 458 |
| Plutella xylostella | Vrp1 | TC012341 | GS893 | 459 |
| Plutella xylostella | dre4-CG1828 | TC014294 | GS886 | 460 |
| [symbol] | Dhx15 | TC000481 | GS896 | 461 |
| Plutella xylostella | CG40470 | TC000165 | GS888 | 462 |
| Plutella xylostella | Rpl40 | FBgn0003941 | GS927 | 463 |
| Plutella xylostella | Rps21 | FBgn0015521 | GS937 | 464 |
| Plutella xylostella | RpL3 | FBgn0020910 | GS938 | 465 |
| Plutella xylostella | Vps28 | FBgn0021814 | GS939 | 466 |
| Plutella xylostella | Sec23A | FBgn0262125 | GS928 | 467 |
| Plutella xylostella | Sec6 | FBgn0266671 | GS929 | 468 |
| Plutella xylostella | vATPase-Vha26 | FBgn0283535 | GS940 | 469 |
| Plutella xylostella | Vps16A | FBgn0285911 | GS941 | 470 |
| Plutella xylostella | UEV1a | Dmel_CG10640 | GS930 | 471 |
| Plutella xylostella | relish | Dmel_CG11992 | GS931 | 472 |
| Plutella xylostella | diptericin | Dmel_CG12763 | GS963 | 473 |
| [symbol] | spirit | Dmel_{—}CG2056 | GS964 | 474 |
| Plutella xylostella | sphynx | Dmel_CG32382 | GS948 | 475 |
| [symbol] | grass | Dmel_{—}CG5896 | GS957 | 476 |
| Plutella xylostella | pelle | Dmel_CG5974 | GS953 | 477 |
| Plutella xylostella | DIF | Dmel_CG6667 | GS951 | 478 |
| [symbol] | Effete | Dmel_{—}CG7425 | GS958 | 479 |
| Plutella xylostella | spheroide | Dmel_CG9675 | GS960 | 480 |
| Plutella xylostella | Toll | Dmel_CG5490 | GS952 | 481 |
| Plutella xylostella | Tab2 | Dmel_CG7417 | GS961 | 482 |
| Plutella xylostella | caudal | NM_001273712 | GS955 | 483 |
| Plutella xylostella | methonine-rich_storage_protein | JF798635 | GS949 | 484 |
| Plutella xylostella | Insulin_receptor_1 | KX507134 | GS947 | 485 |
| Plutella xylostella | Sh - Shaker | TC003580 | GS950 | 486 |
| Plutella xylostella | SK - small conductance calcium-activated | TC014196 | GS962 | 487 |
| | potassium channel | | | |
| Plutella xylostella | chitinase1 | JQ653040 | GS954 | 488 |
| [symbol] | ATPase | JQ653046 | GS959 | 489 |
| Plutella xylostella | Vacuolar ATPase A | KM591219 | GS956 | 490 |
| [symbol] | methionine_{—}rich_{—}storage_{—}protein | ABX55887.1 | GS1009 | 491 |
| | (hexamerin homolog) | | | |
| [symbol] | chitinase | AAS18266.1 | GS1001 | 492 |
| Plutella xylostella | troponin | AYD60125.1 | GS1249 | 493 |
| Plutella xylostella | P102 | AIE56154.1_P102 | GS1256 | 494 |
| Plutella xylostella | Sodium/potassium-transporting ATPase | AT1B_ARTSF | GS989 | 512 |
| | subunit alpha-B | | | |
| Plutella xylostella | Lac | LACH_DROME | GS990 | 513 |
| Plutella xylostella | lov | LOV_DROME | GS991 | 514 |
| Plutella xylostella | jar | MYS9_DROME | GS992 | 516 |
| Plutella xylostella | Clk | CLOCK_DROME | GS993 | 517 |
| Plutella xylostella | lap | PICAL_DROME | GS994 | 518 |
| Plutella xylostella | Atu | ATU_DROME | GS995 | 519 |
| Plutella xylostella | LUBEL | LUBEL_DROME | GS996 | 520 |
| [symbol] | XNP | ATRX_{—}DROME | GS997 | 521 |
| [symbol] | Wnt4 | WNT4_{—}DROME | GS998 | 522 |
| [symbol] | Wdr24 | WDR24_{—}DROME | GS999 | 523 |
| [symbol] | HSP70B2 | HSP74_{—}ANOAL | GS1002 | 524 |
| Plutella xylostella | PAN1 | PAN1_PICST | GS1003 | 525 |
| Plutella xylostella | Aplip1 | JIP1_DROME | GS1005 | 526 |
| [symbol] | Taf5 | TAF5_{—}MOUSE | GS1006 | 527 |
| [symbol] | hb | HUNB_{—}MANSE | GS1007 | 528 |
| Plutella xylostella | Fur1 | FUR11_ DROME | GS1008 | 529 |
| [symbol] | Protein Wnt-4 | WNT4_{—}DROME | GS998 | 536 |
| Plutella xylostella | Protein dachsous | DS_DROME | GS1000 | 537 |
| [symbol] | CycE | CCNE_{—}DROME | GS1004 | 538 |
| [symbol] | Slc22a3 | S22A3_{—}RAT | GS1010 | 539 |
| Plutella xylostella | V-type proton ATPase subunit D | VATD_MANSE | GS1011 | 540 |
| Plutella xylostella | Eip74EF | E74EB_DROME | GS1070 | 541 |

TABLE 1C

| | Target | | | Trigger |
|---|---|---|---|---|
| Universal | SEQ ID | | | SEQ ID |
| ID | NO. | Genes Targeted | Target Species | NO. |
| GS1713 | 542 | CHCH2_MOUSE | Plutella xylostella | 823 |
| GS1714 | 543 | LAMA2_HUMAN | Plutella xylostella | 824 |
| GS1715 | 544 | RLR73_PLAVT | Plutella xylostella | 825 |
| GS1716 | 545 | KGP25_DROME | Plutella xylostella | 826 |
| GS1717 | 546 | MDM12_CLAL4 | Plutella xylostella | 827 |
| GS1718 | 547 | DCLK_DROER | Plutella xylostella | 828 |
| GS1719 | 548 | PAR16_HUMAN | Plutella xylostella | 829 |
| GS1720 | 549 | RLMD_LEGPL | Plutella xylostella | 830 |
| GS1721 | 550 | AMGO1_HUMAN | Plutella xylostella | 831 |
| GS1722 | 551 | LRC23_MOUSE | Plutella xylostella | 832 |
| GS1723 | 552 | ANLN_DROME | Plutella xylostella | 833 |
| GS1724 | 553 | FACR1_ARATH | Plutella xylostella | 834 |
| GS1725 | 554 | CDC14_EMENI | Plutella xylostella | 835 |
| GS1726 | 555 | CBPB1_CANLF | Plutella xylostella | 836 |
| GS1727 | 556 | GXCDD_DICDI | Plutella xylostella | 837 |
| GS1729 | 557 | MUC18_MOUSE | Plutella xylostella | 838 |
| GS1730 | 558 | DVR1_STRPU | Plutella xylostella | 839 |
| GS1732 | 559 | BLAB4_ELIME | Plutella xylostella | 840 |
| GS1733 | 560 | TI110_ARATH | Plutella xylostella | 841 |
| GS1734 | 561 | TRM1_ELHVK | Plutella xylostella | 842 |
| GS1736 | 562 | TEKT3_RAT | Plutella xylostella | 843 |
| GS1737 | 563 | TOLB_PELUB | Plutella xylostella | 844 |
| GS1738 | 564 | ATPE_STAA1 | Plutella xylostella | 845 |
| GS1739 | 565 | LUXS_HALH3 | Plutella xylostella | 846 |
| GS1740 | 566 | HSPB1_POELU | Plutella xylostella | 847 |
| GS1741 | 567 | UBP21_SCHPO | Plutella xylostella | 848 |
| GS1742 | 568 | MTCH2_HUMAN | Plutella xylostella | 849 |
| GS1744 | 569 | KIN82_YEAST | Plutella xylostella | 850 |
| GS1745 | 570 | SAHH_ACIAC | Plutella xylostella | 851 |
| GS1746 | 571 | PI16_HUMAN | Plutella xylostella | 852 |
| GS1747 | 572 | GLMM_CELJU | Plutella xylostella | 853 |
| GS1748 | 573 | TBA1_NEUCR | Plutella xylostella | 854 |
| GS1749 | 574 | EIF3A_MAGO7 | Plutella xylostella | 855 |
| GS1750 | 575 | TEN3_DANRE | Plutella xylostella | 856 |
| GS1751 | 576 | FBP1_STRPU | Plutella xylostella | 857 |
| GS1752 | 577 | TBA_COLOR | Plutella xylostella | 858 |
| GS1753 | 578 | NDUB9_MOUSE | Plutella xylostella | 859 |
| GS1755 | 579 | SYT_MYXXD | Plutella xylostella | 860 |
| GS1756 | 580 | POL3_DROME | Plutella xylostella | 861 |
| GS1757 | 581 | CCC1_ORYSJ | Plutella xylostella | 862 |
| GS1758 | 582 | PTR6_ARATH | Plutella xylostella | 863 |
| GS1760 | 583 | DFP_BOMMO | Plutella xylostella | 864 |
| GS1761 | 584 | PXDN_HUMAN | Plutella xylostella | 865 |
| GS1762 | 585 | GYL1_YEAST | Plutella xylostella | 866 |
| GS1765 | 586 | ATPB_BACV8 | Plutella xylostella | 867 |
| GS1766 | 587 | L_MMVR | Plutella xylostella | 868 |
| GS1767 | 588 | SPAN_SHIFL | Plutella xylostella | 869 |
| GS1768 | 589 | SUZ2_DROME | Plutella xylostella | 870 |
| GS1769 | 590 | BROMI_DANRE | Plutella xylostella | 871 |
| GS1770 | 591 | DPOL_ADE12 | Plutella xylostella | 872 |
| GS1771 | 592 | UBE2S_XENTR | Plutella xylostella | 873 |
| GS1772 | 593 | CAD23_HUMAN | Plutella xylostella | 874 |
| GS1773 | 594 | SHO1_ASPOR | Plutella xylostella | 875 |
| GS1774 | 595 | RL15_LACP7 | Plutella xylostella | 876 |
| GS1775 | 596 | HMDH1_YEAST | Plutella xylostella | 877 |
| GS1777 | 597 | FMT_ACTSZ | Plutella xylostella | 878 |
| GS1783 | 598 | PBCB_SCHGR | Plutella xylostella | 879 |
| GS1784 | 599 | FA12_MOUSE | Plutella xylostella | 880 |
| GS1785 | 600 | TRPC2_MOUSE | Plutella xylostella | 881 |
| GS1786 | 601 | RL18_EXISA | Plutella xylostella | 882 |
| GS1787 | 602 | HGFA_MOUSE | Plutella xylostella | 883 |
| GS1788 | 603 | ARHGC_HUMAN | Plutella xylostella | 884 |
| GS1790 | 604 | YCIT_ECOLI | Plutella xylostella | 885 |
| GS1791 | 605 | CU19_LOCMI | Plutella xylostella | 886 |
| GS1793 | 606 | ADDL_OPITP | Plutella xylostella | 887 |
| GS1550 | 607 | TX11A_ETHRU | Plutella xylostella | 888 |
| GS1551 | 608 | SYN_DROME | Plutella xylostella | 889 |
| GS1555 | 609 | KAD2_ANOGA | Plutella xylostella | 890 |
| GS1556 | 610 | 60A_DROVI | Plutella xylostella | 891 |
| GS1557 | 611 | PCAT_DROME | Plutella xylostella | 892 |
| GS1559 | 612 | NACH_DROME | Plutella xylostella | 893 |
| GS1561 | 613 | IPYR_DROME | Plutella xylostella | 894 |
| GS1562 | 614 | TRH_DROME | Plutella xylostella | 895 |
| GS1563 | 615 | IF4A3_DROME | Plutella xylostella | 896 |
| GS1568 | 616 | FUR1C_DROME | Plutella xylostella | 897 |
| GS1569 | 617 | GCSH_DROME | Plutella xylostella | 898 |
| GS1571 | 618 | UBA5_BOMMO | Plutella xylostella | 899 |
| GS1573 | 619 | HSP7E_DROME | Plutella xylostella | 900 |
| GS1574 | 620 | COLT_DROME | Plutella xylostella | 901 |
| GS1575 | 621 | SUH_DROME | Plutella xylostella | 902 |
| GS1579 | 622 | PSD11_DROME | Plutella xylostella | 903 |
| GS1580 | 623 | MO2B1_AEDAE | Plutella xylostella | 904 |
| GS1581 | 624 | NOP14_DROME | Plutella xylostella | 905 |
| GS1583 | 625 | S22A7_MOUSE | Plutella xylostella | 906 |
| GS1585 | 626 | TITIN_DROME | Plutella xylostella | 907 |
| GS1586 | 627 | KLHDB_AEDAE | Plutella xylostella | 908 |
| GS1587 | 628 | CU66_HYACE | Plutella xylostella | 909 |
| GS1588 | 629 | hexamerine | Plutella xylostella | 910 |
| GS1591 | 630 | SY65_DROME | Plutella xylostella | 911 |
| GS1596 | 631 | TUD_DROME | Plutella xylostella | 912 |
| GS1599 | 632 | CUD5_LOCMI | Plutella xylostella | 913 |
| GS1601 | 633 | VP13D_DROME | Plutella xylostella | 914 |
| GS1604 | 634 | RFC2_DROME | Plutella xylostella | 915 |
| GS1606 | 635 | CPSF2_DROME | Plutella xylostella | 916 |
| GS1608 | 636 | METL_DROME | Plutella xylostella | 917 |
| GS1609 | 637 | SYDE_DROME | Plutella xylostella | 918 |
| GS1610 | 638 | C12B2_DROME | Plutella xylostella | 919 |
| GS1612 | 639 | RRF2M_DROVI | Plutella xylostella | 920 |
| GS1615 | 640 | NNRD_AEDAE | Plutella xylostella | 921 |
| GS1616 | 641 | 7LESS_DROVI | Plutella xylostella | 922 |
| GS1621 | 642 | CUO8_BLACR | Plutella xylostella | 923 |
| GS1623 | 643 | POLY_DROME | Plutella xylostella | 924 |
| GS1628 | 644 | PKHF1_DROME | Plutella xylostella | 925 |
| GS1629 | 645 | NPRL2_DROME | Plutella xylostella | 926 |
| GS1758 | 646 | PTR6_ARATH | Plutella xylostella | 927 |
| GS1764 | 647 | CARL2_HUMAN | Plutella xylostella | 928 |
| GS1776 | 648 | ODO2_HAEIN | Plutella xylostella | 929 |
| GS1789 | 649 | R213B_DANRE | Plutella xylostella | 930 |
| GS1941 | 650 | MBF1_YEAST | Plutella xylostella | 931 |
| GS1942 | 651 | SKEL2_DROME | Plutella xylostella | 932 |
| GS1943 | 652 | SKEL2_DROME | Plutella xylostella | 933 |
| GS1944 | 653 | SPA3M_RAT | Plutella xylostella | 934 |
| GS1945 | 654 | PCX1_RAT | Plutella xylostella | 935 |
| GS1946 | 655 | CL14D_ANOGA | Plutella xylostella | 936 |
| GS1947 | 656 | CL14D_ANOGA | Plutella xylostella | 937 |
| GS1951 | 657 | LENG9_MOUSE | Plutella xylostella | 938 |
| GS1952 | 658 | GLSA_SACD2 | Plutella xylostella | 939 |
| GS1953 | 659 | S46A3_CHICK | Plutella xylostella | 940 |
| GS1954 | 660 | SMAP2_CHICK | Plutella xylostella | 941 |
| GS1955 | 661 | POLN_AHEV | Plutella xylostella | 942 |
| GS1956 | 662 | ARH_MOUSE | Plutella xylostella | 943 |
| GS1958 | 663 | CG057_HUMAN | Plutella xylostella | 944 |
| GS1959 | 664 | RELA_HAEIN | Plutella xylostella | 945 |
| GS1960 | 665 | QUEC_NITOC | Plutella xylostella | 946 |
| GS1961 | 666 | CDPKG_ARATH | Plutella xylostella | 947 |
| GS1966 | 667 | RS20_PARPJ | Plutella xylostella | 948 |
| GS1967 | 668 | SCND3_HUMAN | Plutella xylostella | 949 |
| GS1970 | 669 | MILT_DROME | Plutella xylostella | 950 |
| GS1971 | 670 | RGA1_SCHPO | Plutella xylostella | 951 |
| GS1972 | 671 | HSCA_SHEON | Plutella xylostella | 952 |
| GS1973 | 672 | DMD_CHICK | Plutella xylostella | 953 |
| GS1976 | 673 | PLH33_FORAG | Plutella xylostella | 954 |
| GS1977 | 674 | HACD3_DANRE | Plutella xylostella | 955 |
| GS1978 | 675 | CU27_MANSE | Plutella xylostella | 956 |
| GS1979 | 676 | ATM_ASHGO | Plutella xylostella | 957 |
| GS1980 | 677 | DS_DROME | Plutella xylostella | 958 |
| GS1981 | 678 | LITD1_HUMAN | Plutella xylostella | 959 |
| GS1982 | 679 | NRF6_CAEEL | Plutella xylostella | 960 |
| GS1983 | 680 | VPC46_MYCTU | Plutella xylostella | 961 |
| GS1984 | 681 | DNAK_KORVE | Plutella xylostella | 962 |
| GS1985 | 682 | RPOA_ALIF1 | Plutella xylostella | 963 |
| GS1986 | 683 | Y855_MYCLE | Plutella xylostella | 964 |
| GS1990 | 684 | Y855_MYCLE | Plutella xylostella | 965 |
| GS1991 | 685 | SPNA_DICDI | Plutella xylostella | 966 |
| GS1995 | 686 | ATPD_AERS4 | Plutella xylostella | 967 |
| GS1996 | 687 | CFA47_HUMAN | Plutella xylostella | 968 |
| GS1998 | 688 | YEBS_ECO57 | Plutella xylostella | 969 |
| GS2000 | 689 | CHI10_DROME | Plutella xylostella | 970 |
| GS2001 | 690 | PIPE_DROME | Plutella xylostella | 971 |
| GS2002 | 691 | RTXE_DROME | Plutella xylostella | 972 |
| GS2003 | 692 | SRS2L_ARATH | Plutella xylostella | 973 |
| GS2005 | 693 | RTJK_DROME | Plutella xylostella | 974 |
| GS2009 | 694 | APOA_MACMU | Plutella xylostella | 975 |
| GS2010 | 695 | YSH1_CANAL | Plutella xylostella | 976 |
| GS2012 | 696 | SMYD4_PONAB | Plutella xylostella | 977 |
| GS2013 | 697 | ECM5_YEAST | Plutella xylostella | 978 |
| GS2014 | 698 | PRMA_HERA2 | Plutella xylostella | 979 |
| GS2015 | 699 | RS3A_LACBS | Plutella xylostella | 980 |
| GS2016 | 700 | PIPE_DROME | Plutella xylostella | 981 |
| GS2017 | 701 | MURB_STACT | Plutella xylostella | 982 |
| GS2018 | 702 | CU27_MANSE | Plutella xylostella | 983 |
| GS2019 | 703 | LEF11_NPVAH | Plutella xylostella | 984 |
| GS2020 | 704 | CLIP1_CHICK | Plutella xylostella | 985 |
| GS2021 | 705 | YLJ5_CAEEL | Plutella xylostella | 986 |
| GS2022 | 706 | ABCG5_HUMAN | Plutella xylostella | 987 |
| GS2024 | 707 | DUSP3_DICDI | Plutella xylostella | 988 |
| GS2025 | 708 | SAR1_TOBAC | Plutella xylostella | 989 |
| GS2026 | 709 | PRS2_METJA | Plutella xylostella | 990 |
| GS2027 | 710 | SYI_PROMA | Plutella xylostella | 991 |
| GS2029 | 711 | LCA5_HUMAN | Plutella xylostella | 992 |
| GS2030 | 712 | RSMA_CHLP8 | Plutella xylostella | 993 |
| GS2032 | 713 | GRRE1_HUMAN | Plutella xylostella | 994 |
| GS2033 | 714 | PGAP6_HUMAN | Plutella xylostella | 995 |
| GS2034 | 715 | ARGC_METTH | Plutella xylostella | 996 |
| GS2036 | 716 | ITA5_MOUSE | Plutella xylostella | 997 |
| GS2038 | 717 | ERV41_SCHPO | Plutella xylostella | 998 |
| GS2039 | 718 | SYC_MYCMO | Plutella xylostella | 999 |
| GS2040 | 719 | NCAM2_MOUSE | Plutella xylostella | 1000 |
| GS2041 | 720 | RX_DROME | Plutella xylostella | 1001 |
| GS2043 | 721 | HEM1_DELLE | Plutella xylostella | 1002 |
| GS2045 | 722 | MON1_YEAST | Plutella xylostella | 1003 |
| GS2046 | 723 | KPR5_SCHPO | Plutella xylostella | 1004 |
| GS2049 | 724 | YSH1_YEAST | Plutella xylostella | 1005 |
| GS2050 | 725 | TULP4_MOUSE | Plutella xylostella | 1006 |
| GS2051 | 726 | CU03_LONON | Plutella xylostella | 1007 |
| GS2053 | 727 | DRC10_MOUSE | Plutella xylostella | 1008 |
| GS2054 | 728 | TSCOT_CANLF | Plutella xylostella | 1009 |
| GS2055 | 729 | TSCOT_MOUSE | Plutella xylostella | 1010 |
| GS2057 | 730 | PGBM_HUMAN | Plutella xylostella | 1011 |
| GS2058 | 731 | Z354A_HUMAN | Plutella xylostella | 1012 |
| GS2059 | 732 | CU27_MANSE | Plutella xylostella | 1013 |
| GS2060 | 733 | CU03_LONON | Plutella xylostella | 1014 |
| GS2061 | 734 | CLP15_ANOGA | Plutella xylostella | 1015 |
| GS2062 | 735 | AMI_XENLA | Plutella xylostella | 1016 |
| GS2064 | 736 | RTBS_DROME | Plutella xylostella | 1017 |
| GS2065 | 737 | K1C14_RAT | Plutella xylostella | 1018 |
| GS2066 | 738 | SAXO2_HUMAN | Plutella xylostella | 1019 |
| GS2067 | 739 | FUT9_BOVIN | Plutella xylostella | 1020 |
| GS2069 | 740 | NRF6_CAEEL | Plutella xylostella | 1021 |
| GS2071 | 741 | ICCR_DROME | Plutella xylostella | 1022 |
| GS2072 | 742 | INDY1_DROME | Plutella xylostella | 1023 |
| GS2074 | 743 | UREND_METTH | Plutella xylostella | 1024 |
| GS2078 | 744 | Y028_PYRCJ | Plutella xylostella | 1025 |
| GS2083 | 745 | PIPE_DROME | Plutella xylostella | 1026 |
| GS2084 | 746 | NS1BP_XENLA | Plutella xylostella | 1027 |
| GS2085 | 747 | BEST1_HUMAN | Plutella xylostella | 1028 |
| GS2086 | 748 | PABP_SCHPO | Plutella xylostella | 1029 |
| GS2087 | 749 | KCAB2_HUMAN | Plutella xylostella | 1030 |
| GS2088 | 750 | CUD8_SCHGR | Plutella xylostella | 1031 |
| GS2089 | 751 | DPOE_ASPFU | Plutella xylostella | 1032 |
| GS2090 | 752 | ABCA2_HUMAN | Plutella xylostella | 1033 |
| GS2092 | 753 | AMT52_ALTAL | Plutella xylostella | 1034 |
| GS2094 | 754 | NIFN_NOSS1 | Plutella xylostella | 1035 |
| GS2095 | 755 | SPZ4_DROME | Plutella xylostella | 1036 |
| GS2096 | 756 | CU14_MANSE | Plutella xylostella | 1037 |
| GS2097 | 757 | OACYL_MOUSE | Plutella xylostella | 1038 |
| GS2098 | 758 | HCN1_RABIT | Plutella xylostella | 1039 |
| GS2100 | 759 | COPB_ENTHA | Plutella xylostella | 1040 |
| GS2102 | 760 | SYDND_PARUW | Plutella xylostella | 1041 |
| GS2105 | 761 | MTP2_NEIGO | Plutella xylostella | 1042 |
| GS2106 | 762 | 5HT2B_HUMAN | Plutella xylostella | 1043 |
| GS1728 | 763 | XM_011551654 | Plutella xylostella | 1044 |
| GS1731 | 764 | XM_011571056 | Plutella xylostella | 1045 |
| GS1735 | 765 | XM_038118719 | Plutella xylostella | 1046 |
| GS1743 | 766 | MG571541 | Plutella xylostella | 1047 |
| GS1754 | 767 | XM_038117076 | Plutella xylostella | 1048 |
| GS1759 | 768 | XM_011563718 | Plutella xylostella | 1049 |
| GS1763 | 769 | NA | Plutella xylostella | 1050 |
| GS1778 | 770 | XM_038112923 | Plutella xylostella | 1051 |
| GS1780 | 771 | XM_038106157 | Plutella xylostella | 1052 |
| GS1781 | 772 | LN594483 | Plutella xylostella | 1053 |
| GS1782 | 773 | XR_005253948 | Plutella xylostella | 1054 |
| GS1792 | 774 | XM_038108360 | Plutella xylostella | 1055 |
| GS1795 | 775 | XM_011565794 | Plutella xylostella | 1056 |
| GS1948 | 776 | XM_038113609 | Plutella xylostella | 1057 |
| GS1949 | 777 | XM_038105622 | Plutella xylostella | 1058 |
| GS1950 | 778 | NA | Plutella xylostella | 1059 |
| GS1957 | 779 | LN590690 | Plutella xylostella | 1060 |
| GS1962 | 780 | XM_038108184 | Plutella xylostella | 1061 |
| GS1963 | 781 | XM_011565785 | Plutella xylostella | 1062 |
| GS1964 | 782 | NA | Plutella xylostella | 1063 |
| GS1965 | 783 | XM_038110733 | Plutella xylostella | 1064 |
| GS1968 | 784 | HG992030 | Plutella xylostella | 1065 |
| GS1969 | 785 | XM_038119701 | Plutella xylostella | 1066 |
| GS1974 | 786 | XM_038109269 | Plutella xylostella | 1067 |
| GS1975 | 787 | XM_038105771 | Plutella xylostella | 1068 |
| GS1988 | 788 | NA | Plutella xylostella | 1069 |
| GS1989 | 789 | KY965816 | Plutella xylostella | 1070 |
| GS1992 | 790 | XM_038114699 | Plutella xylostella | 1071 |
| GS1994 | 791 | XM_038106632 | Plutella xylostella | 1072 |
| GS1997 | 792 | FR997851 | Plutella xylostella | 1073 |
| GS2004 | 793 | XM_038112617 | Plutella xylostella | 1074 |
| GS2006 | 794 | XM_038114699 | Plutella xylostella | 1075 |
| GS2007 | 795 | LR990146 | Plutella xylostella | 1076 |
| GS2008 | 796 | LN590690 | Plutella xylostella | 1077 |
| GS2023 | 797 | XM_011571033 | Plutella xylostella | 1078 |
| GS2028 | 798 | LR994581 | Plutella xylostella | 1079 |
| GS2031 | 799 | XM_038120499 | Plutella xylostella | 1080 |
| GS2035 | 800 | XM_038121414 | Plutella xylostella | 1081 |
| GS2037 | 801 | XM_038122197 | Plutella xylostella | 1082 |
| GS2042 | 802 | XM_011552302 | Plutella xylostella | 1083 |
| GS2044 | 803 | XM_038111095 | Plutella xylostella | 1084 |
| GS2047 | 804 | XM_011556613 | Plutella xylostella | 1085 |
| GS2048 | 805 | XM_038110436 | Plutella xylostella | 1086 |
| GS2052 | 806 | NA | Plutella xylostella | 1087 |
| GS2056 | 807 | XM_011550987 | Plutella xylostella | 1088 |
| GS2063 | 808 | LN590703 | Plutella xylostella | 1089 |
| GS2068 | 809 | LN590687 | Plutella xylostella | 1090 |
| GS2070 | 810 | NA | Plutella xylostella | 1091 |
| GS2073 | 811 | XM_038114293 | Plutella xylostella | 1092 |
| GS2075 | 812 | XM_011552302 | Plutella xylostella | 1093 |
| GS2076 | 813 | XR_005254795 | Plutella xylostella | 1094 |
| GS2077 | 814 | XM_038116680 | Plutella xylostella | 1095 |
| GS2079 | 815 | XR_005254795 | Plutella xylostella | 1096 |
| GS2080 | 816 | NA | Plutella xylostella | 1097 |
| GS2081 | 817 | LN596718 | Plutella xylostella | 1098 |
| GS2082 | 818 | XM_038107108 | Plutella xylostella | 1099 |
| GS2091 | 819 | XM_038121040 | Plutella xylostella | 1100 |
| GS2093 | 820 | XM_011554829 | Plutella xylostella | 1101 |
| GS2103 | 821 | XM_038120174 | Plutella xylostella | 1102 |
| GS2104 | 822 | XM_038113068 | Plutella xylostella | 1103 |
| GS1240 | 1104 | RU17_DICDI | Plutella xylostella | 1334 |
| GS1241 | 1105 | CSW_DROME | Plutella xylostella | 1335 |
| GS1243 | 1106 | PHM_DROME | Plutella xylostella | 1336 |
| GS1244 | 1107 | BDL_DROME | Plutella xylostella | 1337 |
| GS1245 | 1108 | NFX1_HUMAN | Plutella xylostella | 1338 |
| GS1246 | 1109 | WECH_DROME | Plutella xylostella | 1339 |
| GS1247 | 1110 | ENA_DROME | Plutella xylostella | 1340 |
| GS1248 | 1111 | TCPD_CAEEL | Plutella xylostella | 1341 |
| GS1250 | 1112 | HSP74_DROME | Plutella xylostella | 1342 |
| GS1251 | 1113 | SEM2A_DROME | Plutella xylostella | 1343 |
| GS1252 | 1114 | E75_GALME | Plutella xylostella | 1344 |
| GS1253 | 1115 | DCTN2_ANOGA | Plutella xylostella | 1345 |
| GS1254 | 1116 | VATB_HELVI | Plutella xylostella | 1346 |
| GS1255 | 1117 | RRF2M_DROGR | Plutella xylostella | 1347 |
| GS1258 | 1118 | OSA_DROME | Plutella xylostella | 1348 |
| GS1259 | 1119 | BAB2_DROME | Plutella xylostella | 1349 |
| GS1260 | 1120 | MDR2_CRIGR | Plutella xylostella | 1350 |
| GS1261 | 1121 | PROS_DROME | Plutella xylostella | 1351 |
| GS1262 | 1122 | RAD54_DROMO | Plutella xylostella | 1352 |
| GS1263 | 1123 | SEPT1_DROME | Plutella xylostella | 1353 |
| GS1265 | 1124 | ACSA_DROME | Plutella xylostella | 1354 |
| GS1270 | 1125 | RAD54_DROWI | Plutella xylostella | 1355 |
| GS1271 | 1126 | MCM7_DROME | Plutella xylostella | 1356 |
| GS1272 | 1127 | EF1A_SPOFR | Plutella xylostella | 1357 |
| GS1273 | 1128 | PAL1_DROME | Plutella xylostella | 1358 |
| GS1274 | 1129 | E75_METEN | Plutella xylostella | 1359 |
| GS1275 | 1130 | DJC25_DROME | Plutella xylostella | 1360 |
| GS1277 | 1131 | RPA2_DROME | Plutella xylostella | 1361 |
| GS1278 | 1132 | YAA4_YEAST | Plutella xylostella | 1362 |
| GS1281 | 1133 | EGON_DROME | Plutella xylostella | 1363 |
| GS1282 | 1134 | CPO_DROME | Plutella xylostella | 1364 |
| GS1288 | 1135 | POK_DROME | Plutella xylostella | 1365 |
| GS1290 | 1136 | KI26L_DROME | Plutella xylostella | 1366 |
| GS1291 | 1137 | DRONC_DROME | Plutella xylostella | 1367 |
| GS1293 | 1138 | GIL_DROME | Plutella xylostella | 1368 |
| GS1294 | 1139 | DDC_DROLE | Plutella xylostella | 1369 |
| GS1296 | 1140 | SPAST_DROGR | Plutella xylostella | 1370 |
| GS1297 | 1141 | SUV3_DROME | Plutella xylostella | 1371 |
| GS1298 | 1142 | RDGC_DROME | Plutella xylostella | 1372 |
| GS1300 | 1143 | 7UP1_DROME | Plutella xylostella | 1373 |
| GS1301 | 1144 | DCTN2_AEDAE | Plutella xylostella | 1374 |
| GS1302 | 1145 | HIRA_DROME | Plutella xylostella | 1375 |
| GS1305 | 1146 | RPP30_MOUSE | Plutella xylostella | 1376 |
| GS1306 | 1147 | MES4_DROME | Plutella xylostella | 1377 |
| GS1307 | 1148 | RIM2_DROME | Plutella xylostella | 1378 |
| GS1308 | 1149 | KL98A_DROME | Plutella xylostella | 1379 |
| GS1310 | 1150 | FAS3_DROME | Plutella xylostella | 1380 |
| GS1311 | 1151 | ITPR_DROME | Plutella xylostella | 1381 |
| GS1312 | 1152 | CNC_DROME | Plutella xylostella | 1382 |
| GS1314 | 1153 | LOLA3_DROME | Plutella xylostella | 1383 |
| GS1316 | 1154 | HSP83_BOMMO | Plutella xylostella | 1384 |
| GS1327 | 1155 | ES8L2_HUMAN | Plutella xylostella | 1385 |
| GS1329 | 1156 | BRAT_DROME | Plutella xylostella | 1386 |
| GS1333 | 1157 | UBIA1_DROME | Plutella xylostella | 1387 |
| GS1335 | 1158 | DDX41_DROME | Plutella xylostella | 1388 |
| GS1338 | 1159 | DDX1_DROME | Plutella xylostella | 1389 |
| GS1344 | 1160 | THOC6_DROME | Plutella xylostella | 1390 |
| GS1345 | 1161 | ARL8_DROME | Plutella xylostella | 1391 |
| GS1352 | 1162 | DRE2_AEDAE | Plutella xylostella | 1392 |
| GS1354 | 1163 | HMDH_AGRIP | Plutella xylostella | 1393 |
| GS1356 | 1164 | TSN7_PONPY | Plutella xylostella | 1394 |
| GS1359 | 1165 | TRE12_DROSI | Plutella xylostella | 1395 |
| GS1360 | 1166 | RHEB_DROME | Plutella xylostella | 1396 |
| GS1362 | 1167 | ORB2_DROME | Plutella xylostella | 1397 |
| GS1363 | 1168 | PATJ_DROME | Plutella xylostella | 1398 |
| GS1364 | 1169 | NU154_DROME | Plutella xylostella | 1399 |
| GS1365 | 1170 | TTF2_DROME | Plutella xylostella | 1400 |
| GS1366 | 1171 | INO80_DROME | Plutella xylostella | 1401 |
| GS1367 | 1172 | RHOL_DROME | Plutella xylostella | 1402 |
| GS1368 | 1173 | MCM5_DROME | Plutella xylostella | 1403 |
| GS1369 | 1174 | WDR48_AEDAE | Plutella xylostella | 1404 |
| GS1370 | 1175 | RRF2M_DROWI | Plutella xylostella | 1405 |
| GS1371 | 1176 | VATD1_DROME | Plutella xylostella | 1406 |
| GS1372 | 1177 | EF1A_BOMMO | Plutella xylostella | 1407 |
| GS1373 | 1178 | CHD1_BOMMO | Plutella xylostella | 1408 |
| GS1374 | 1179 | DLISH_DROME | Plutella xylostella | 1409 |
| GS1375 | 1180 | DCA10_DROME | Plutella xylostella | 1410 |
| GS1376 | 1181 | PP2B2_DROME | Plutella xylostella | 1411 |
| GS1377 | 1182 | MMD4_DROME | Plutella xylostella | 1412 |
| GS1378 | 1183 | HR3_GALME | Plutella xylostella | 1413 |
| GS1379 | 1184 | PUM2_HUMAN | Plutella xylostella | 1414 |
| GS1380 | 1185 | CAD99_DROME | Plutella xylostella | 1415 |
| GS1381 | 1186 | ATNA_DROME | Plutella xylostella | 1416 |
| GS1382 | 1187 | PFKA_DROME | Plutella xylostella | 1417 |
| GS1383 | 1188 | ETS4_DROME | Plutella xylostella | 1418 |
| GS1384 | 1189 | TID_DROVI | Plutella xylostella | 1419 |
| GS1385 | 1190 | ORCT_DROME | Plutella xylostella | 1420 |
| GS1386 | 1191 | SAS10_RAT | Plutella xylostella | 1421 |
| GS1387 | 1192 | MY31D_DROME | Plutella xylostella | 1422 |
| GS1388 | 1193 | SIMA_DROME | Plutella xylostella | 1423 |
| GS1389 | 1194 | ARI2_DROME | Plutella xylostella | 1424 |
| GS1390 | 1195 | TCAB1_DROME | Plutella xylostella | 1425 |
| GS1391 | 1196 | BLM_DROME | Plutella xylostella | 1426 |
| GS1392 | 1197 | NDUBA_BOMMO | Plutella xylostella | 1427 |
| GS1393 | 1198 | IF2H_RAT | Plutella xylostella | 1428 |
| GS1394 | 1199 | LIS1_DROGR | Plutella xylostella | 1429 |
| GS1395 | 1200 | YMEL1_DROME | Plutella xylostella | 1430 |
| GS1396 | 1201 | LOLA2_DROME | Plutella xylostella | 1431 |
| GS1397 | 1202 | RBP2_BOVIN | Plutella xylostella | 1432 |
| GS1398 | 1203 | SYEP_DROME | Plutella xylostella | 1433 |
| GS1399 | 1204 | PCNA_BOMMO | Plutella xylostella | 1434 |
| GS1400 | 1205 | RS12_DROME | Plutella xylostella | 1435 |
| GS1401 | 1206 | RDX_DROME | Plutella xylostella | 1436 |
| GS1402 | 1207 | AP3D_DROME | Plutella xylostella | 1437 |
| GS1403 | 1208 | MCM3_DROME | Plutella xylostella | 1438 |
| GS1404 | 1209 | FBXW7_DROME | Plutella xylostella | 1439 |
| GS1409 | 1210 | NAAT1_DROMO | Plutella xylostella | 1440 |
| GS1410 | 1211 | CISY2_AEDAE | Plutella xylostella | 1441 |
| GS1411 | 1212 | U430_DROME | Plutella xylostella | 1442 |
| GS1412 | 1213 | ASAH2_MOUSE | Plutella xylostella | 1443 |
| GS1413 | 1214 | CCNB3_DROME | Plutella xylostella | 1444 |
| GS1414 | 1215 | TAF5_HUMAN | Plutella xylostella | 1445 |
| GS1415 | 1216 | HMCS1_BLAGE | Plutella xylostella | 1446 |
| GS1416 | 1217 | COG6_DROME | Plutella xylostella | 1447 |
| GS1417 | 1218 | UNC80_DROME | Plutella xylostella | 1448 |
| GS1418 | 1219 | TRET1_CULQU | Plutella xylostella | 1449 |
| GS1419 | 1220 | SYAM_DROME | Plutella xylostella | 1450 |
| GS1420 | 1221 | PGP2L_DROME | Plutella xylostella | 1451 |
| GS1421 | 1222 | PGSC2_DROSI | Plutella xylostella | 1452 |
| GS1422 | 1223 | AMY1_DROAN | Plutella xylostella | 1453 |
| GS1423 | 1224 | RAS1_DROYA | Plutella xylostella | 1454 |
| GS1424 | 1225 | MLC1_DROVI | Plutella xylostella | 1455 |
| GS1425 | 1226 | 1433E_DROME | Plutella xylostella | 1456 |
| GS1426 | 1227 | MAD_DROME | Plutella xylostella | 1457 |
| GS1427 | 1228 | GOBP2_EPIPO | Plutella xylostella | 1458 |
| GS1428 | 1229 | DOPR1_DROME | Plutella xylostella | 1459 |
| GS1429 | 1230 | SPR_DROME | Plutella xylostella | 1460 |
| GS1430 | 1231 | GS1_DROME | Plutella xylostella | 1461 |
| GS1431 | 1232 | CU21_LOCMI | Plutella xylostella | 1462 |
| GS1432 | 1233 | ADT_DROME | Plutella xylostella | 1463 |
| GS1433 | 1234 | TTC14_DROME | Plutella xylostella | 1464 |
| GS1434 | 1235 | NOI_DROME | Plutella xylostella | 1465 |
| GS1435 | 1236 | RT06_DROME | Plutella xylostella | 1466 |
| GS1436 | 1237 | NAF1_DROME | Plutella xylostella | 1467 |
| GS1437 | 1238 | ASH1_DROME | Plutella xylostella | 1468 |
| GS1438 | 1239 | EF1A2_DROME | Plutella xylostella | 1469 |
| GS1439 | 1240 | GTR1_DROME | Plutella xylostella | 1470 |
| GS1440 | 1241 | YELL_DROER | Plutella xylostella | 1471 |
| GS1441 | 1242 | EXT2_BOVIN | Plutella xylostella | 1472 |
| GS1442 | 1243 | RL11_SPOFR | Plutella xylostella | 1473 |
| GS1443 | 1244 | KDM5_DROME | Plutella xylostella | 1474 |
| GS1444 | 1245 | ESTE_MYZPE | Plutella xylostella | 1475 |
| GS1445 | 1246 | L2GL_DROPS | Plutella xylostella | 1476 |
| GS1446 | 1247 | DHGL_DROME | Plutella xylostella | 1477 |
| GS1447 | 1248 | MRJP1_APIME | Plutella xylostella | 1478 |
| GS1448 | 1249 | NCD_DROME | Plutella xylostella | 1479 |
| GS1449 | 1250 | ICYA_MANSE | Plutella xylostella | 1480 |
| GS1450 | 1251 | MUL1_DROME | Plutella xylostella | 1481 |
| GS1452 | 1252 | NOG1_DROME | Plutella xylostella | 1482 |
| GS1453 | 1253 | YELL_DROME | Plutella xylostella | 1483 |
| GS1454 | 1254 | RBGPR_DROME | Plutella xylostella | 1484 |
| GS1455 | 1255 | ASPP_AEDAE | Plutella xylostella | 1485 |
| GS1456 | 1256 | HTRA2_DROME | Plutella xylostella | 1486 |
| GS1458 | 1257 | RIR1_DROME | Plutella xylostella | 1487 |
| GS1459 | 1258 | PLXB_DROME | Plutella xylostella | 1488 |
| GS1460 | 1259 | CMC_DROME | Plutella xylostella | 1489 |
| GS1461 | 1260 | PROML_DROME | Plutella xylostella | 1490 |
| GS1462 | 1261 | CANB2_DROME | Plutella xylostella | 1491 |
| GS1463 | 1262 | CASP8_DROPS | Plutella xylostella | 1492 |
| GS1464 | 1263 | MED14_AEDAE | Plutella xylostella | 1493 |
| GS1465 | 1264 | GR43A_DROME | Plutella xylostella | 1494 |
| GS1466 | 1265 | POMT2_DROPS | Plutella xylostella | 1495 |
| GS1467 | 1266 | NPY6R_MOUSE | Plutella xylostella | 1496 |
| GS1468 | 1267 | FICD_CULQU | Plutella xylostella | 1497 |
| GS1469 | 1268 | 1433Z_BOMMO | Plutella xylostella | 1498 |
| GS1470 | 1269 | GPR9_AMPAM | Plutella xylostella | 1499 |
| GS1471 | 1270 | PA2_BOMPE | Plutella xylostella | 1500 |
| GS1472 | 1271 | BRC4_DROME | Plutella xylostella | 1501 |
| GS1473 | 1272 | IF4E_DROME | Plutella xylostella | 1502 |
| GS1474 | 1273 | PAL2_DROME | Plutella xylostella | 1503 |
| GS1475 | 1274 | S39AD_DROME | Plutella xylostella | 1504 |
| GS1476 | 1275 | MADD_DROME | Plutella xylostella | 1505 |
| GS1477 | 1276 | RABL3_DANRE | Plutella xylostella | 1506 |
| GS1478 | 1277 | BRM_DROME | Plutella xylostella | 1507 |
| GS1479 | 1278 | DIA_DROME | Plutella xylostella | 1508 |
| GS1480 | 1279 | 41_DROME | Plutella xylostella | 1509 |
| GS1481 | 1280 | CUD3_SCHGR | Plutella xylostella | 1510 |
| GS1482 | 1281 | CDC42_AEDAE | Plutella xylostella | 1511 |
| GS1483 | 1282 | SPZ_DROME | Plutella xylostella | 1512 |
| GS1484 | 1283 | FYV1_DROME | Plutella xylostella | 1513 |
| GS1485 | 1284 | ELG_DROME | Plutella xylostella | 1514 |
| GS1486 | 1285 | IMPL2_DROME | Plutella xylostella | 1515 |
| GS1488 | 1286 | WDR1_DROME | Plutella xylostella | 1516 |
| GS1489 | 1287 | PRS6B_MANSE | Plutella xylostella | 1517 |
| GS1490 | 1288 | TTKA_DROME | Plutella xylostella | 1518 |
| GS1491 | 1289 | IF2G_DROME | Plutella xylostella | 1519 |
| GS1547 | 1290 | DHE2_ACHKL | Plutella xylostella | 1520 |
| GS1548 | 1291 | SPS1_DROME | Plutella xylostella | 1521 |
| GS1549 | 1292 | PP2A_DROME | Plutella xylostella | 1522 |
| GS1552 | 1293 | MTTF_DROME | Plutella xylostella | 1523 |
| GS1553 | 1294 | CAZ_DROME | Plutella xylostella | 1524 |
| GS1554 | 1295 | HDAC1_DROME | Plutella xylostella | 1525 |
| GS1558 | 1296 | TERA_DROME | Plutella xylostella | 1526 |
| GS1560 | 1297 | EXT2_DROME | Plutella xylostella | 1527 |
| GS1564 | 1298 | PRIC1_ANOGA | Plutella xylostella | 1528 |
| GS1565 | 1299 | DGK2_DROME | Plutella xylostella | 1529 |
| GS1566 | 1300 | TCPD_OCHTR | Plutella xylostella | 1530 |
| GS1567 | 1301 | RL18_SPOFR | Plutella xylostella | 1531 |
| GS1570 | 1302 | PYRG_DROME | Plutella xylostella | 1532 |
| GS1572 | 1303 | WHITE_DROME | Plutella xylostella | 1533 |
| GS1576 | 1304 | MFRN1_HUMAN | Plutella xylostella | 1534 |
| GS1577 | 1305 | PRS8_MANSE | Plutella xylostella | 1535 |
| GS1578 | 1306 | DDX49_DROME | Plutella xylostella | 1536 |
| GS1582 | 1307 | ADA17_DROME | Plutella xylostella | 1537 |
| GS1584 | 1308 | ESN_DROPS | Plutella xylostella | 1538 |
| GS1589 | 1309 | GLYR1_AEDAE | Plutella xylostella | 1539 |
| GS1590 | 1310 | CP301_DROME | Plutella xylostella | 1540 |
| GS1592 | 1311 | NARF_AEDAE | Plutella xylostella | 1541 |
| GS1593 | 1312 | COQ4_BOMMO | Plutella xylostella | 1542 |
| GS1594 | 1313 | CP4S3_DROME | Plutella xylostella | 1543 |
| GS1595 | 1314 | WLS_DROVI | Plutella xylostella | 1544 |
| GS1597 | 1315 | SWS_DROME | Plutella xylostella | 1545 |
| GS1598 | 1316 | EVI5_DROME | Plutella xylostella | 1546 |
| GS1600 | 1317 | H1_DROME | Plutella xylostella | 1547 |
| GS1602 | 1318 | EXO1_DROME | Plutella xylostella | 1548 |
| GS1603 | 1319 | Y2678_METMA | Plutella xylostella | 1549 |
| GS1605 | 1320 | PH4H_DROME | Plutella xylostella | 1550 |
| GS1607 | 1321 | CARME_DROME | Plutella xylostella | 1551 |
| GS1611 | 1322 | C12C1_DROME | Plutella xylostella | 1552 |
| GS1613 | 1323 | NOSL_BOMMO | Plutella xylostella | 1553 |
| GS1614 | 1324 | BXA3_SAMCY | Plutella xylostella | 1554 |
| GS1617 | 1325 | GATA_CULQU | Plutella xylostella | 1555 |
| GS1618 | 1326 | OPS2_MANSE | Plutella xylostella | 1556 |
| GS1619 | 1327 | RL24_PLUXY | Plutella xylostella | 1557 |
| GS1620 | 1328 | DCLK_DROSI | Plutella xylostella | 1558 |
| GS1622 | 1329 | CUBN_DROME | Plutella xylostella | 1559 |
| GS1624 | 1330 | PTTH_BOMMO | Plutella xylostella | 1560 |
| GS1625 | 1331 | MED15_AEDAE | Plutella xylostella | 1561 |
| GS1626 | 1332 | ERCC3_DROME | Plutella xylostella | 1562 |
| GS1627 | 1333 | ECE_LOCMI | Plutella xylostella | 1563 |
| GS1249 | 1564 | P36188 | Plutella xylostella | 1624 |
| GS1256 | 1565 | A1L237 | Plutella xylostella | 1625 |
| GS1728 | 1566 | XM_011551654 | Plutella xylostella | 1626 |
| GS1731 | 1567 | XM_038110302 | Plutella xylostella | 1627 |
| GS1735 | 1568 | XM_038118719 | Plutella xylostella | 1628 |
| GS1743 | 1569 | MG571541 | Plutella xylostella | 1629 |
| GS1754 | 1570 | XM_038117076 | Plutella xylostella | 1630 |
| GS1759 | 1571 | XM_011563718 | Plutella xylostella | 1631 |
| GS1763 | 1572 | NA | Plutella xylostella | 1632 |
| GS1778 | 1573 | XM_038112923 | Plutella xylostella | 1633 |
| GS1780 | 1574 | XM_038106157 | Plutella xylostella | 1634 |
| GS1781 | 1575 | XM_038111383 | Plutella xylostella | 1635 |
| GS1782 | 1576 | XR_005253948 | Plutella xylostella | 1636 |
| GS1792 | 1577 | XM_038108360 | Plutella xylostella | 1637 |
| GS1795 | 1578 | XM_011565794 | Plutella xylostella | 1638 |
| GS1948 | 1579 | XM_038113609 | Plutella xylostella | 1639 |
| GS1949 | 1580 | XM_038105623 | Plutella xylostella | 1640 |
| GS1950 | 1581 | NA | Plutella xylostella | 1641 |
| GS1957 | 1582 | LN590690 | Plutella xylostella | 1642 |
| GS1962 | 1583 | XM_038108184 | Plutella xylostella | 1643 |
| GS1963 | 1584 | XM_011565785 | Plutella xylostella | 1644 |
| GS1964 | 1585 | NA | Plutella xylostella | 1645 |
| GS1965 | 1586 | XM_038110733 | Plutella xylostella | 1646 |
| GS1968 | 1587 | HG992030 | Plutella xylostella | 1647 |
| GS1969 | 1588 | XM_038119701 | Plutella xylostella | 1648 |
| GS1974 | 1589 | XM_038109269 | Plutella xylostella | 1649 |
| GS1975 | 1590 | XM_038105771 | Plutella xylostella | 1650 |
| GS1988 | 1591 | NA | Plutella xylostella | 1651 |
| GS1989 | 1592 | KY965816 | Plutella xylostella | 1652 |
| GS1992 | 1593 | XM_038114699 | Plutella xylostella | 1653 |
| GS1994 | 1594 | XM_038106632 | Plutella xylostella | 1654 |
| GS1997 | 1595 | MG571541 | Plutella xylostella | 1655 |
| GS2006 | 1596 | XM_038114699 | Plutella xylostella | 1656 |
| GS2008 | 1597 | LN590690 | Plutella xylostella | 1657 |
| GS2023 | 1598 | XM_011571033 | Plutella xylostella | 1658 |
| GS2028 | 1599 | LR994581 | Plutella xylostella | 1659 |
| GS2031 | 1600 | XM_038120499 | Plutella xylostella | 1660 |
| GS2035 | 1601 | XM_038121414 | Plutella xylostella | 1661 |
| GS2037 | 1602 | MG571541 | Plutella xylostella | 1662 |
| GS2042 | 1603 | XM_011552302 | Plutella xylostella | 1663 |
| GS2044 | 1604 | XM_038111095 | Plutella xylostella | 1664 |
| GS2047 | 1605 | XM_011556613 | Plutella xylostella | 1665 |
| GS2048 | 1606 | XM_038121712 | Plutella xylostella | 1666 |
| GS2052 | 1607 | CP020383 | Plutella xylostella | 1667 |
| GS2056 | 1608 | XM_011550987 | Plutella xylostella | 1668 |
| GS2063 | 1609 | LN594646 | Plutella xylostella | 1669 |
| GS2068 | 1610 | LN596087 | Plutella xylostella | 1670 |
| GS2070 | 1611 | NA | Plutella xylostella | 1671 |
| GS2073 | 1612 | XM_038114293 | Plutella xylostella | 1672 |
| GS2075 | 1613 | XM_011552302 | Plutella xylostella | 1673 |
| GS2076 | 1614 | XR_005254795 | Plutella xylostella | 1674 |
| GS2077 | 1615 | XM_038116680 | Plutella xylostella | 1675 |
| GS2079 | 1616 | XR_005254795 | Plutella xylostella | 1676 |
| GS2080 | 1617 | NA | Plutella xylostella | 1677 |
| GS2081 | 1618 | XM_038107769 | Plutella xylostella | 1678 |
| GS2082 | 1619 | XM_038107108 | Plutella xylostella | 1679 |
| GS2091 | 1620 | XM_038121040 | Plutella xylostella | 1680 |
| GS2093 | 1621 | XM_011554829 | Plutella xylostella | 1681 |
| GS2103 | 1622 | XM_038120174 | Plutella xylostella | 1682 |
| GS2104 | 1623 | XM_038113068 | Plutella xylostella | 1683 |

### Example 1: Identification of RNAi Lethal Genes in P. xylostella

### Primary Screening Bioassays.

[0229] dsRNA molecules were tested for insecticidal activity against P. xylostella in artificial diet-based bioassays. Briefly, artificial diet containing unformulated (e.g. naked dsRNA) or formulated (see for example section VI. supra) dsRNA were placed in a 47-mm Petri dish. Five to seven late L1 instar DBM larvae were added per Petri dish using a fine pencil brush. Each treatment contained 5 replicates. Surviving insects 2 days after assay initiation were considered the total number of insects in the test and this number was used for calculating mortality. Freshly treated diet was added to each Petri dish on day 7, and thereafter untreated diet was added as needed. The larvae were observed for mortality at day 9. Observations were continued for up to 14 days, until larvae developed to pupae. Mortality was corrected though the Henderson-Tilton formula as reported in Tables 2 and 3. Bioassays were scored as follows:

% mortality

| 0 | 1-14 | 15-30 | >30 |
|---|---|---|---|
| − | + | ++ | +++ |

[0230] The scoring data is provided in Tables 2 and 3 below. Each of the dsRNA molecules in Tables 2 and 3 are identified by their GS number which correlate to the Trigger IDs and SEQ ID NOs provided in Table 1A. The underlined/italicized SEQ ID NOs represent those sequences having a score of ++ or +++ per the data shown in Tables 2 and 3.

TABLE 2

| | Corrected |
|---|---|
| | Mortality |
| ID | D 9 |
| GS144 | + |
| GS146 | ++ |
| GS148 | + |
| GS150 | + |
| GS152 | ++ |
| GS268 | + |
| GS269 | +++ |
| GS270 | + |
| GS271 | + |
| GS272 | + |
| GS273 | + |
| GS318 | ++ |
| GS319 | ++ |
| GS320 | + |
| GS321 | +++ |
| GS322 | + |
| GS323 | + |
| GS324 | + |
| GS325 | + |
| GS326 | ++ |
| GS327 | − |
| GS328 | + |
| GS329 | ++ |
| GS330 | + |
| GS331 | + |
| GS332 | + |
| GS333 | + |
| GS334 | + |
| GS335 | + |
| GS336 | + |
| GS337 | + |
| GS338 | + |

TABLE 3

| | Corrected |
|---|---|
| | Mortality |
| ID | D9 |
| GS453 | − |
| GS454 | − |
| GS455 | − |
| GS456 | − |
| GS457 | − |
| GS458 | + |
| GS459 | − |
| GS460 | − |
| GS461 | − |
| GS462 | − |
| GS463 | + |
| GS464 | − |
| GS465 | + |
| GS468 | + |
| GS469 | − |
| GS471 | − |
| GS485 | − |
| GS486 | +++ |
| GS487 | − |
| GS488 | − |
| GS489 | − |
| GS490 | − |
| GS491 | − |
| GS492 | − |
| GS493 | − |
| GS494 | − |
| GS495 | − |
| GS496 | − |
| GS497 | − |

### Example 2: Identification of RNAi Lethal Genes in S. frugiperda

### Primary Screening Bioassays.

[0231] dsRNA molecules were tested for insecticidal activity against S. frugiperda in artificial diet-based bioassays. Briefly, artificial diet containing unformulated or formulated dsRNA were placed in in 24-well plates. One fall armyworm neonate was placed per well using a fine pencil brush. Plates were covered with a commercially available translucent seal. Each treatment contained 16-24 replicates which were randomized in multiple 24-well plates. Insects were re-treated with fresh diet incorporated with dsRNA on day 5. The insects are observed for mortality and stunting (development arrested at L3) for up to 12 days. dsRNA designed to target green fluorescent protein and water were used as negative controls. Bioassays were scored as follows:

% mortality

| 0 | 1-14 | 15-30 | >30 |
|---|---|---|---|
| − | + | ++ | +++ |

[0232] The scoring data is provided in Tables 4 and 5 below. Each of the dsRNA molecules in Tables 4 and 5 are identified by their GS number which correlate to the SEQ ID NO provided in Table 1A. The bolded SEQ ID NOs in Table 1A represent those sequences having a score of ++ or +++.

TABLE 4

| ID | Mortality |
|---|---|
| GS262 | − |
| GS263 | +++ |
| GS264 | − |
| GS265 | ++ |
| GS266 | − |
| GS267 | − |
| GS297 | − |
| GS298 | − |
| GS299 | − |
| GS300 | ++ |
| GS301 | − |
| GS302 | − |
| GS303 | − |
| GS304 | − |
| GS305 | +++ |
| GS306 | ++ |
| GS307 | − |
| GS309 | +++ |
| GS311 | − |
| GS313 | − |
| GS314 | − |
| GS315 | − |
| GS316 | − |
| GS317 | − |

TABLE 5

| ID | Mortality |
|---|---|
| GS440 | − |
| GS441 | − |
| GS442 | − |
| GS443 | − |
| GS444 | − |
| GS445 | − |
| GS446 | − |
| GS447 | − |
| GS448 | − |
| GS449 | − |
| GS450 | − |
| GS451 | − |
| GS452 | − |
| GS466 | − |
| GS467 | − |
| GS470 | +++ |
| GS472 | − |
| GS473 | − |
| GS474 | − |
| GS475 | − |
| GS476 | − |
| GS477 | − |
| GS478 | +++ |
| GS479 | − |
| GS480 | − |
| GS481 | − |
| GS482 | +++ |
| GS483 | − |
| GS484 | − |

### Example 3: Identification of RNAi Lethal Genes in P. xylostella

[0233] dsRNA molecules were tested for insecticidal activity against P. xylostella in artificial diet-based bioassays. Briefly, artificial diet plugs were incorporated with 50 uL of naked dsRNA at 1 mg/mL. The plugs were placed each in a 47-mm Petri dish. 5 late L1 stage larvae were placed per Petri dish. Fresh untreated diet was added on day 7. Alive insects after 3 days of dsRNA exposure are the total number of insects used for mortality calculations. The insects were monitored for mortality and development up to 13 days.

[0234] The scoring data is provided in Tables 6 and 7 below. Mortality was adjusted by the Henderson Tilton's formula and corrected mortality is below. Each of the dsRNA molecules in Tables 6 and 7 are identified by their GS number which correlate to the SEQ ID NO provided in Table 1B. The bolded SEQ ID NOs represent those sequences having a score of ++ or +++.

% mortality

| 0 | 1-14 | 15-30 | >30 |
|---|---|---|---|
| − | + | ++ | +++ |

TABLE 6

| | Corrected |
|---|---|
| ID | Mortality D13 |
| GS889 | + |
| GS891 | + |
| GS895 | + |
| GS897 | + |
| GS898 | ++ |
| GS899 | + |
| GS901 | ++ |
| GS904 | − |
| GS908 | + |
| GS912 | − |
| GS914 | + |
| GS928 | + |
| GS937 | − |
| GS941 | − |
| GS947 | + |
| GS951 | + |
| GS953 | + |
| GS954 | + |
| GS956 | + |
| GS957 | ++ |
| GS958 | ++ |
| GS959 | +++ |
| GS960 | + |
| GS961 | + |
| GS962 | + |
| GS963 | + |
| GS964 | ++ |
| GS984 | ++ |
| GS1000 | + |
| GS1004 | ++ |
| GS1009 | ++ |
| GS1010 | ++ |
| GS1011 | − |
| GS1070 | + |

TABLE 7

| | Corrected |
|---|---|
| ID | Mortality |
| GS907 | − |
| GS909 | +++ |
| GS910 | − |
| GS911 | + |
| GS913 | + |
| GS915 | − |
| GS916 | − |
| GS927 | − |
| GS929 | − |
| GS930 | − |
| GS931 | − |
| GS938 | + |
| GS939 | + |
| GS940 | − |
| GS989 | ++ |
| GS990 | + |
| GS991 | ++ |
| GS992 | ++ |
| GS993 | ++ |
| GS994 | ++ |
| GS995 | ++ |
| GS996 | +++ |
| GS997 | ++ |
| GS998 | +++ |
| GS999 | ++ |
| GS1001 | +++ |
| GS1002 | ++ |
| GS1003 | + |
| GS1005 | + |
| GS1006 | +++ |
| GS1007 | +++ |
| GS1008 | + |
| GS886 | − |
| GS887 | +++ |
| GS888 | − |
| GS890 | − |
| GS892 | +++ |
| GS893 | − |
| GS894 | − |
| GS896 | +++ |
| GS900 | ++ |
| GS902 | − |
| GS903 | − |
| GS905 | ++ |
| GS906 | + |
| GS948 | − |
| GS949 | − |
| GS950 | − |
| GS952 | − |
| GS955 | − |
| GS983 | − |

### Example 4: Identification of RNAi Lethal Genes in P. xylostella

[0235] dsRNA molecules were tested for insecticidal activity against P. xylostella in artificial diet-based bioassays. Briefly, artificial diet plugs were incorporated with 50 uL of naked dsRNA at 1 mg/mL. The plugs were placed each in a 47-mm Petri dish. 5 late L1 larvae were placed per Petri dish. Fresh untreated diet was added on day 7. Alive insects after 3 days of dsRNA exposure were the total number of insects used for mortality calculations. The insects were monitored for mortality and development up to 14 days. The scoring data is provided in Table 9 below. Mortality was adjusted by the Henderson Tilton's formula and corrected mortality is below. Each of the dsRNA molecules in Table 9 are identified by their GS number which correlate to the SEQ ID NO provided in Table 1C. The bolded SEQ ID NOs in Table 1C represent those sequences having a score of ++ or +++, and each of such sequences may be used individually in the claimed methods or compositions.

% mortality

| 0 | 1-14 | 15-30 | >30 |
|---|---|---|---|
| − | + | ++ | +++ |

TABLE 8

| | | Corrected |
|---|---|---|
| | Mortality | Mortality |
| ID | D14 | D14 |
| GS1240 | +++ | ++ |
| GS1241 | ++ | ++ |
| GS1243 | +++ | ++ |
| GS1244 | ++ | + |
| GS1245 | ++ | − |
| GS1246 | ++ | + |
| GS1247 | ++ | − |
| GS1248 | +++ | ++ |
| GS1249 | +++ | ++ |
| GS1250 | ++ | + |
| GS1251 | +++ | ++ |
| GS1252 | ++ | + |
| GS1253 | ++ | + |
| GS1254 | +++ | ++ |
| GS1255 | ++ | + |
| GS1256 | +++ | ++ |
| GS1258 | ++ | + |
| GS1259 | ++ | + |
| GS1260 | ++ | + |
| GS1261 | +++ | ++ |
| GS1262 | +++ | + |
| GS1263 | +++ | ++ |
| GS1265 | +++ | +++ |
| GS1270 | ++ | + |
| GS1271 | + | + |
| GS1272 | ++ | + |
| GS1273 | ++ | + |
| GS1274 | ++ | − |
| GS1275 | + | − |
| GS1277 | ++ | + |
| GS1278 | +++ | ++ |
| GS1281 | +++ | ++ |
| GS1282 | ++ | + |
| GS1288 | ++ | + |
| GS1290 | ++ | − |
| GS1291 | ++ | + |
| GS1293 | ++ | + |
| GS1294 | ++ | + |
| GS1296 | ++ | − |
| GS1297 | ++ | − |
| GS1298 | ++ | + |
| GS1300 | ++ | − |
| GS1301 | ++ | − |
| GS1302 | + | − |
| GS1305 | + | − |
| GS1306 | +++ | ++ |
| GS1307 | + | − |
| GS1308 | ++ | + |
| GS1310 | + | − |
| GS1311 | + | − |
| GS1312 | ++ | + |
| GS1314 | ++ | + |
| GS1316 | + | − |
| GS1327 | − | − |
| GS1329 | ++ | ++ |
| GS1333 | ++ | ++ |
| GS1335 | + | + |
| GS1338 | + | − |
| GS1344 | + | + |
| GS1345 | + | + |
| GS1352 | + | − |
| GS1354 | +++ | ++ |
| GS1356 | + | + |
| GS1359 | ++ | + |
| GS1360 | ++ | ++ |
| GS1362 | + | + |
| GS1363 | − | − |
| GS1364 | ++ | + |
| GS1365 | ++ | + |
| GS1366 | + | − |
| GS1367 | + | − |
| GS1368 | ++ | + |
| GS1369 | ++ | + |
| GS1370 | + | − |
| GS1371 | ++ | + |
| GS1372 | ++ | + |
| GS1373 | ++ | + |
| GS1374 | + | − |
| GS1375 | ++ | + |
| GS1376 | ++ | + |
| GS1377 | ++ | + |
| GS1378 | + | − |
| GS1379 | ++ | + |
| GS1380 | ++ | + |
| GS1381 | ++ | + |
| GS1382 | ++ | ++ |
| GS1383 | ++ | + |
| GS1384 | + | − |
| GS1385 | +++ | ++ |
| GS1386 | + | − |
| GS1387 | ++ | ++ |
| GS1388 | ++ | + |
| GS1389 | + | − |
| GS1390 | +++ | ++ |
| GS1391 | +++ | ++ |
| GS1392 | ++ | + |
| GS1393 | + | − |
| GS1394 | ++ | + |
| GS1395 | + | − |
| GS1396 | ++ | + |
| GS1397 | + | − |
| GS1398 | + | − |
| GS1399 | + | − |
| GS1400 | + | − |
| GS1401 | ++ | + |
| GS1402 | + | − |
| GS1403 | ++ | + |
| GS1404 | ++ | + |
| GS1419 | − | − |
| GS1425 | + | − |
| GS1431 | + | − |
| GS1437 | + | − |
| GS1443 | − | − |
| GS1449 | − | − |
| GS1455 | − | − |
| GS1456 | + | + |
| GS1461 | + | + |
| GS1462 | + | + |
| GS1467 | + | + |
| GS1468 | + | − |
| GS1473 | + | + |
| GS1474 | + | + |
| GS1475 | + | − |
| GS1479 | + | − |
| GS1480 | ++ | ++ |
| GS1485 | + | + |
| GS1486 | + | + |
| GS1491 | + | + |
| GS1409 | + | + |
| GS1410 | + | + |
| GS1411 | + | + |
| GS1412 | − | − |
| GS1413 | + | + |
| GS1414 | − | − |
| GS1415 | ++ | ++ |
| GS1416 | ++ | ++ |
| GS1417 | + | + |
| GS1418 | + | + |
| GS1420 | + | + |
| GS1421 | + | + |
| GS1422 | + | + |
| GS1423 | + | + |
| GS1424 | + | + |
| GS1426 | + | + |
| GS1427 | + | + |
| GS1428 | + | + |
| GS1429 | + | + |
| GS1430 | + | + |
| GS1432 | + | + |
| GS1433 | + | + |
| GS1434 | + | + |
| GS1435 | + | + |
| GS1436 | + | + |
| GS1438 | + | + |
| GS1439 | ++ | ++ |
| GS1440 | + | + |
| GS1441 | + | + |
| GS1442 | ++ | ++ |
| GS1444 | + | + |
| GS1445 | + | + |
| GS1446 | − | − |
| GS1447 | + | + |
| GS1448 | + | + |
| GS1450 | ++ | ++ |
| GS1452 | + | + |
| GS1453 | − | − |
| GS1454 | + | + |
| GS1458 | + | + |
| GS1459 | + | + |
| GS1460 | + | + |
| GS1463 | + | + |
| GS1464 | +++ | +++ |
| GS1465 | ++ | ++ |
| GS1466 | ++ | ++ |
| GS1469 | + | + |
| GS1470 | + | + |
| GS1471 | +++ | +++ |
| GS1472 | + | + |
| GS1476 | ++ | ++ |
| GS1477 | + | + |
| GS1478 | − | − |
| GS1481 | + | + |
| GS1482 | + | + |
| GS1483 | + | + |
| GS1484 | ++ | ++ |
| GS1488 | + | + |
| GS1489 | + | + |
| GS1490 | − | − |
| GS1547 | ++ | ++ |
| GS1548 | + | + |
| GS1549 | + | + |
| GS1552 | − | − |
| GS1553 | + | + |
| GS1554 | + | + |
| GS1558 | − | − |
| GS1560 | + | + |
| GS1564 | + | + |
| GS1565 | + | + |
| GS1566 | + | + |
| GS1567 | + | + |
| GS1570 | − | − |
| GS1572 | − | − |
| GS1576 | + | + |
| GS1577 | + | + |
| GS1578 | + | + |
| GS1582 | + | + |
| GS1584 | ++ | ++ |
| GS1589 | + | + |
| GS1590 | ++ | ++ |
| GS1592 | + | + |
| GS1593 | + | + |
| GS1594 | + | + |
| GS1595 | − | − |
| GS1597 | + | + |
| GS1598 | ++ | ++ |
| GS1600 | + | + |
| GS1602 | ++ | ++ |
| GS1603 | − | − |
| GS1605 | ++ | ++ |
| GS1607 | + | + |
| GS1611 | + | + |
| GS1613 | + | + |
| GS1614 | + | + |
| GS1617 | + | + |
| GS1618 | + | + |
| GS1619 | + | + |
| GS1620 | + | + |
| GS1622 | + | + |
| GS1624 | + | + |
| GS1625 | + | + |
| GS1626 | + | + |
| GS1627 | + | + |
| GS1713 | +++ | + |
| GS1714 | ++ | + |
| GS1715 | + | − |
| GS1716 | +++ | +++ |
| GS1717 | +++ | +++ |
| GS1718 | +++ | ++ |
| GS1719 | ++ | − |
| GS1720 | ++ | ++ |
| GS1721 | ++ | + |
| GS1722 | +++ | ++ |
| GS1723 | +++ | ++ |
| GS1724 | +++ | +++ |
| GS1725 | ++ | + |
| GS1726 | ++ | + |
| GS1727 | ++ | + |
| GS1728 | +++ | ++ |
| GS1729 | ++ | + |
| GS1730 | ++ | − |
| GS1731 | ++ | − |
| GS1732 | +++ | +++ |
| GS1733 | +++ | +++ |
| GS1734 | +++ | ++ |
| GS1735 | ++ | + |
| GS1736 | + | − |
| GS1737 | +++ | ++ |
| GS1738 | +++ | +++ |
| GS1739 | ++ | + |
| GS1740 | + | − |
| GS1741 | ++ | − |
| GS1742 | ++ | + |
| GS1743 | +++ | +++ |
| GS1744 | ++ | + |
| GS1745 | +++ | ++ |
| GS1746 | ++ | + |
| GS1747 | +++ | ++ |
| GS1748 | +++ | +++ |
| GS1749 | ++ | + |
| GS1750 | + | − |
| GS1751 | + | − |
| GS1752 | + | − |
| GS1753 | ++ | + |
| GS1754 | ++ | + |
| GS1755 | ++ | + |
| GS1756 | + | − |
| GS1757 | ++ | ++ |
| GS1758 | + | − |
| GS1759 | + | − |
| GS1760 | ++ | + |
| GS1761 | + | − |
| GS1762 | ++ | + |
| GS1763 | + | + |
| GS1765 | + | − |
| GS1766 | + | + |
| GS1767 | ++ | + |
| GS1768 | ++ | + |
| GS1769 | ++ | + |
| GS1770 | ++ | + |
| GS1771 | ++ | + |
| GS1772 | +++ | +++ |
| GS1773 | ++ | + |
| GS1774 | ++ | + |
| GS1775 | ++ | ++ |
| GS1777 | + | + |
| GS1778 | ++ | + |
| GS1780 | ++ | + |
| GS1781 | ++ | + |
| GS1782 | ++ | + |
| GS1783 | + | − |
| GS1784 | + | + |
| GS1785 | + | − |
| GS1786 | + | − |
| GS1787 | ++ | ++ |
| GS1788 | + | − |
| GS1790 | + | − |
| GS1791 | ++ | + |
| GS1791 | + | − |
| GS1792 | ++ | + |
| GS1793 | + | − |
| GS1550 | ++ | + |
| GS1551 | + | − |
| GS1555 | + | − |
| GS1556 | ++ | + |
| GS1557 | ++ | ++ |
| GS1559 | ++ | ++ |
| GS1561 | + | − |
| GS1562 | ++ | + |
| GS1563 | ++ | + |
| GS1568 | + | + |
| GS1569 | ++ | + |
| GS1571 | + | + |
| GS1573 | ++ | + |
| GS1574 | ++ | ++ |
| GS1575 | ++ | + |
| GS1579 | ++ | + |
| GS1580 | + | − |
| GS1581 | ++ | + |
| GS1583 | − | − |
| GS1585 | + | − |
| GS1586 | + | − |
| GS1587 | + | − |
| GS1588 | + | − |
| GS1591 | + | − |
| GS1596 | − | − |
| GS1599 | + | − |
| GS1601 | + | − |
| GS1604 | + | + |
| GS1606 | + | − |
| GS1608 | − | − |
| GS1609 | − | − |
| GS1610 | + | − |
| GS1612 | + | − |
| GS1615 | + | − |
| GS1616 | + | − |
| GS1621 | + | − |
| GS1623 | + | − |
| GS1628 | − | − |
| GS1629 | + | − |
| GS1758 | + | − |
| GS1764 | + | − |
| GS1776 | ++ | + |
| GS1789 | − | − |
| GS1795 | + | − |
| GS1941 | ++ | − |
| GS1942 | + | − |
| GS1943 | + | + |
| GS1944 | ++ | − |
| GS1945 | ++ | − |
| GS1946 | ++ | + |
| GS1947 | + | + |
| GS1948 | ++ | + |
| GS1949 | ++ | + |
| GS1950 | + | + |
| GS1951 | ++ | + |
| GS1952 | + | + |
| GS1953 | ++ | + |
| GS1954 | ++ | − |
| GS1955 | ++ | + |
| GS1956 | ++ | + |
| GS1957 | + | + |
| GS1958 | ++ | − |
| GS1959 | − | + |
| GS1960 | + | ++ |
| GS1961 | + | ++ |
| GS1962 | + | + |
| GS1963 | + | − |
| GS1964 | + | − |
| GS1965 | − | − |
| GS1966 | + | + |
| GS1967 | + | + |
| GS1968 | + | + |
| GS1969 | + | − |
| GS1970 | − | + |
| GS1971 | − | + |
| GS1972 | + | + |
| GS1973 | + | ++ |
| GS1974 | + | − |
| GS1975 | + | − |
| GS1976 | + | − |
| GS1977 | + | − |
| GS1978 | − | + |
| GS1979 | + | − |
| GS1980 | + | + |
| GS1981 | + | − |
| GS1982 | ++ | − |
| GS1983 | ++ | − |
| GS1984 | ++ | − |
| GS1985 | + | − |
| GS1986 | + | − |
| GS1988 | ++ | − |
| GS1989 | + | − |
| GS1990 | + | − |
| GS1991 | ++ | + |
| GS1992 | ++ | − |
| GS1994 | + | − |
| GS1995 | + | − |
| GS1996 | ++ | − |
| GS1997 | + | − |
| GS1998 | + | − |
| GS2000 | ++ | + |
| GS2001 | + | − |
| GS2002 | + | − |
| GS2003 | + | − |
| GS2004 | ++ | − |
| GS2005 | ++ | − |
| GS2006 | + | − |
| GS2007 | + | − |
| GS2008 | ++ | − |
| GS2009 | ++ | − |
| GS2010 | ++ | + |
| GS2012 | + | − |
| GS2013 | + | − |
| GS2014 | + | − |
| GS2015 | + | − |
| GS2016 | ++ | − |
| GS2017 | + | − |
| GS2018 | + | − |
| GS2019 | ++ | − |
| GS2020 | + | − |
| GS2021 | ++ | − |
| GS2022 | ++ | + |
| GS2023 | + | − |
| GS2024 | + | − |
| GS2025 | ++ | − |
| GS2026 | + | − |
| GS2027 | ++ | − |
| GS2028 | +++ | + |
| GS2029 | + | − |
| GS2030 | ++ | − |
| GS2031 | ++ | − |
| GS2032 | ++ | − |
| GS2033 | ++ | − |
| GS2034 | ++ | − |
| GS2035 | + | − |
| GS2036 | ++ | − |
| GS2037 | +++ | + |
| GS2038 | +++ | ++ |
| GS2039 | ++ | − |
| GS2040 | ++ | − |
| GS2041 | ++ | + |
| GS2042 | +++ | + |
| GS2043 | ++ | − |
| GS2044 | ++ | − |
| GS2045 | +++ | + |
| GS2046 | +++ | + |
| GS2047 | ++ | − |
| GS2048 | +++ | + |
| GS2049 | +++ | + |
| GS2050 | ++ | − |
| GS2051 | ++ | − |
| GS2052 | ++ | − |
| GS2053 | ++ | − |
| GS2054 | ++ | − |
| GS2055 | ++ | − |
| GS2056 | +++ | + |
| GS2057 | +++ | ++ |
| GS2058 | +++ | ++ |
| GS2059 | +++ | + |
| GS2060 | ++ | − |
| GS2061 | ++ | + |
| GS2062 | ++ | − |
| GS2063 | ++ | ++ |
| GS2064 | ++ | ++ |
| GS2065 | +++ | ++ |
| GS2066 | +++ | ++ |
| GS2067 | ++ | + |
| GS2068 | +++ | +++ |
| GS2069 | +++ | +++ |
| GS2070 | ++ | ++ |
| GS2071 | +++ | +++ |
| GS2072 | ++ | ++ |
| GS2073 | ++ | + |
| GS2074 | +++ | +++ |
| GS2075 | ++ | + |
| GS2076 | ++ | + |
| GS2077 | +++ | +++ |
| GS2078 | ++ | + |
| GS2079 | ++ | ++ |
| GS2080 | ++ | + |
| GS2081 | ++ | ++ |
| GS2082 | +++ | +++ |
| GS2083 | ++ | + |
| GS2084 | + | − |
| GS2085 | ++ | + |
| GS2086 | + | + |
| GS2087 | +++ | +++ |
| GS2088 | ++ | + |
| GS2089 | + | + |
| GS2090 | + | + |
| GS2091 | ++ | + |
| GS2092 | ++ | + |
| GS2093 | ++ | + |
| GS2094 | ++ | + |
| GS2095 | + | − |
| GS2096 | ++ | + |
| GS2097 | ++ | ++ |
| GS2098 | ++ | + |
| GS2100 | ++ | + |
| GS2102 | ++ | ++ |
| GS2103 | ++ | ++ |
| GS2104 | +++ | +++ |
| GS2105 | +++ | ++ |
| GS2106 | ++ | + |

### Example 5: Microinjection Study of dsRNA in P. xylostella

### DBM Injection Protocol

[0236] The scoring data is provided in Table 9 below. Each of the dsRNA molecules in Table 1C are identified by their GS number which correlate to the SEQ ID NO provided in Tables 1A-1C. Certain sequences showing >30% mortality in the diet assays described above were tested by microinjection for further identification of effective sequences, with results showing Table 9 below. P. xylostella larvae were injected with dsRNA of the identified sequences in a similar injection bioassay to that described in Knorr et al. (2018) Scientific Reports 8:2061 at 11 “Gene silencing in Tribolium castaneum as a tool for the targeted identification of candidate RNAi targets in crop pests” with species-appropriate feed. Results are shown in Table 9 with a score of ++ for 50%-63% mortality and +++ for >/=64% mortality.

TABLE 9

| | | Exposure Method |
|---|---|---|
| | | Microinjection |
| | | Estimated |
| | | dsRNA exposure |
| | | 0.05 ug/ |
| | | insect |
| | | ++ >50% |
| | | +++ >64% |
| Wave 1 | GS144 | ++ |
| | GS146 | ++ |
| | GS269 | ++ |
| | GS318 | +++ |
| | GS319 | +++ |
| | GS321 | ++ |
| | GS329 | +++ |
| | GS486 | ++ |
| Wave 2.1 | GS901 | − |
| | GS947 | − |
| | GS953 | − |
| | GS954 | − |
| | GS957 | − |
| | GS958 | +++ |
| | GS959 | − |
| | GS963 | ++ |
| | GS964 | − |
| | GS984 | − |
| | GS961 | +++ |
| Wave 2.2 | GS1265 | − |
| | GS1254 | − |
| | GS1256 | − |
| | GS1261 | ++ |
| | GS1263 | − |
| | GS1281 | − |
| Wave 3 | GS889 | +++ |
| | GS912 | +++ |
| | GS1333 | ++ |
| | GS1373 | ++ |
| | GS1374 | ++ |
| | GS1380 | ++ |
| | GS1464 | − |
| | GS1590 | +++ |
| | GS1594 | +++ |
| | GS1602 | +++ |
| | GS1611 | +++ |
| | GS1618 | − |
| Control | GS134 | − |

What is claimed is:

1. A method for controlling a Lepidopteran pest infestation of a plant comprising:
(a) contacting said Lepidopteran pest with at least one polynucleotide comprising a nucleotide sequence that is complementary to at least 18, 19, 20, 21, 25, 50, 100, 150 or 200 contiguous nucleotides, or complementary to a nucleotide sequence having at least 90 percent, 95 percent or 98 percent identity with said contiguous nucleotides, of a target gene having a nucleotide sequence selected from the group consisting of: SEQ ID NOs 1-114, 229-361, 495-511; 530-535, 542-822, 1104-1333, and 1564-1623, or an RNA transcribed from said target gene; or
(b) providing in the diet of said Lepidopteran pest at least one polynucleotide comprising a nucleotide sequence that is complementary to at least 18, 19, 20, 21, 25, 50, 100, 150 or 200 contiguous nucleotides, or complementary to a nucleotide sequence having at least 90 percent, 95 percent or 98 percent identity with said contiguous nucleotides, of a target gene having a nucleotide sequence selected from the group consisting of: SEQ ID NOs: 1-114, 229-361, 495-511; 530-535, 542-822, 1104-1333, and 1564-1623, or an RNA transcribed from said target gene; or
(c) causing mortality or stunting in larvae of said Lepidopteran pest by providing in the diet of said larvae at least one polynucleotide comprising at least one silencing element comprising at least 18, 19, 20, 21, or 25 contiguous nucleotides that are complementary to a target gene having a nucleotide sequence selected from the group consisting of: SEQ ID NOs: 1-114, 229-361, 495-511; 530-535, 542-822, 1104-1333, and 1564-1623, or an RNA transcribed from said target gene; or
(d) topically applying to said plant a composition comprising at least one polynucleotide comprising a nucleotide sequence that is complementary to at least 18, 19, 20, 21, 25, 50, 100, 150 or 200 contiguous nucleotides, or complementary to a nucleotide sequence having at least 90 percent, 95 percent or 98 percent identity with said contiguous nucleotides, of a target gene having a nucleotide sequence selected from the group consisting of: SEQ ID NOs: 1-114, 229-361, 495-511; 530-535, 542-822, 1104-1333, and 1564-1623, or an RNA transcribed from said target gene; or
(e) topically applying to said plant a composition comprising at least one polynucleotide in a manner such that an effective amount of said polynucleotide is ingested by Lepidopteran species feeding on said plant, said at least one polynucleotide comprising a nucleotide sequence that is complementary to at least 18, 19, 20, 21, 25, 50, 100, 150 or 200 contiguous nucleotides, or complementary to a nucleotide sequence having at least 90 percent, 95 percent or 98 percent identity with said contiguous nucleotides, of a target gene having a nucleotide sequence selected from the group consisting of: SEQ ID NOs: 1-114, 229-361, 495-511; 530-535, 542-822, 1104-1333, and 1564-1623, or an RNA transcribed from said target gene; or
(f) expressing in said plant at least one polynucleotide comprising at least one segment that is essentially identical or complementary to at least 18, 19, 20, 21, 25, 50, 100, 150 or 200 contiguous nucleotides, or essentially identical or complementary to a nucleotide sequence having at least 90 percent, 95 percent or 98 percent identity with said contiguous nucleotides, of a DNA having a sequence selected from the group consisting of: SEQ ID NOs: 1-114, 229-361, 495-511; 530-535, 542-822, 1104-1333, and 1564-1623; or
(g) contacting said Lepidopteran pest with an effective amount of at least one double-stranded RNA, one strand of which is complementary to at least 18, 19, 20, 21, 25, 50, 100, 150 or 200 contiguous nucleotides, or complementary to a nucleotide sequence having at least 90 percent, 95 percent or 98 percent identity with said contiguous nucleotides, of a sequence selected from the group consisting of SEQ ID NOs: 115-228, 362-494, 512-529; 536-541, 823-1103, 1334-1563, and 1624-1683.

2. The method of claim 1, wherein said at least one polynucleotide is a double-stranded RNA.

3. The method of claim 2, wherein said double-stranded RNA is chemically or enzymatically synthesized or is produced by expression in a microorganism or by expression in a plant cell.

4. The method of claim 2, wherein said double-stranded RNA comprises one strand complementary to at least about 50 contiguous nucleotides, at least about 100 nucleotides, at least about 150 nucleotides or at least about 200 contiguous nucleotides, or complementary to a nucleotide sequence having at least 90 percent, 95 percent or 98 percent identity of said contiguous nucleotides, of a sequence selected from the group consisting of SEQ ID NOs: 115, 116, 119, 121, 123, 127, 135, 140, 141, 143, 150, 151, 153, 158, 161, 201, 209, 213, 217, 434, 442, 451, 452, 453, 454, 456, 457, 461, 474, 476, 479, 489, 491, 492, 521, 522, 523, 524, 527, 528, 536, 538, 539, 823, 826, 827, 828, 830, 832, 833, 834, 840, 841, 842, 844, 845, 851, 853, 854, 862, 874, 877, 883, 892, 893, 901, 946, 947, 953, 998, 1011, 1012, 1017, 1018, 1019, 1021, 1022, 1023, 1024, 1030, 1038, 1041, 1042, 1044, 1047, 1089, 1090, 1091, 1095, 1096, 1098, 1099, 1102, 1103, 1334, 1335, 1336, 1341, 1343, 1346, 1351, 1353, 1354, 1362, 1363, 1377, 1386, 1387, 1393, 1396, 1417, 1420, 1422, 1425, 1426, 1446, 1447, 1470, 1473, 1481, 1493, 1494, 1495, 1500, 1505, 1509, 1513, 1520, 1538, 1540, 1546, 1548, 1550, 1624, 1625, 1629, 1682, or 1683.

5. The method of claim 1, wherein said method comprises topically applying to said plant a composition comprising at least one polynucleotide comprising a nucleotide sequence that is complementary to at least 18, 19, 20, 21, 25, 50, 100, 150, or 200 contiguous nucleotides, or complementary to a nucleotide sequence having at least 90 percent, 95 percent or 98 percent identity of said contiguous nucleotides, of a target gene or an RNA transcribed from said target gene, wherein said target gene has a nucleotide sequence selected from the group consisting of: SEQ ID NOs: 2, 5, 7, 9, 13, 21, 26, 27, 29, 36, 37, 39, 44, 47, 87, 95, 99, 103, 301, 309, 318, 319, 320, 321, 323, 324, 328, 341, 343, 346, 356, 358, 359, 503, 504, 505, 506, 509, 510, 530, 532, 533, 542, 545, 546, 547, 549, 551, 552, 553, 559, 560, 561, 563, 564, 570, 572, 573, 581, 593, 596, 602, 611, 612, 620, 665, 666, 672, 717, 730, 731, 736, 737, 738, 740, 741, 742, 743, 749, 757, 760, 761, 763, 766, 808, 809, 810, 814, 815, 817, 818, 821, 822, 1104, 1105, 1106, 1111, 1113, 1116, 1121, 1123, 1124, 1132, 1133, 1147, 1156, 1157, 1163, 1166, 1187, 1190, 1192, 1195, 1196, 1216, 1217, 1240, 1243, 1251, 1263, 1264, 1265, 1270, 1275, 1279, 1283, 1290, 1308, 1310, 1316, 1318, 1320, 1564, 1565, 1569, 1622, and 1623; and, optionally, wherein said composition further comprises one or more components selected from the group consisting of a carrier agent, a surfactant, a cationic lipid, an organosilicone, an organosilicone surfactant, a polynucleotide herbicidal molecule, a nonpolynucleotide herbicidal molecule, a non-polynucleotide pesticide, a safener, and an insect growth regulator.

6. The method of claim 1, wherein said method comprises contacting said Lepidopteran pest with an effective amount of a solution comprising a double-stranded RNA, wherein at least one strand of the double-stranded RNA is complementary to at least 18, 19, 20, 21, 25, 50, 100, 150, or 200 contiguous nucleotides, or complementary to a nucleotide sequence having at least 90 percent, 95 percent or 98 percent identity of said contiguous nucleotides, of a gene that having a sequence selected from the group consisting of SEQ ID NOs: 2, 5, 7, 9, 13, 21, 26, 27, 29, 36, 37, 39, 44, 47, 87, 95, 99, 103, 301, 309, 318, 319, 320, 321, 323, 324, 328, 341, 343, 346, 356, 358, 359, 503, 504, 505, 506, 509, 510, 530, 532, 533, 542, 545, 546, 547, 549, 551, 552, 553, 559, 560, 561, 563, 564, 570, 572, 573, 581, 593, 596, 602, 611, 612, 620, 665, 666, 672, 717, 730, 731, 736, 737, 738, 740, 741, 742, 743, 749, 757, 760, 761, 763, 766, 808, 809, 810, 814, 815, 817, 818, 821, 822, 1104, 1105, 1106, 1111, 1113, 1116, 1121, 1123, 1124, 1132, 1133, 1147, 1156, 1157, 1163, 1166, 1187, 1190, 1192, 1195, 1196, 1216, 1217, 1240, 1243, 1251, 1263, 1264, 1265, 1270, 1275, 1279, 1283, 1290, 1308, 1310, 1316, 1318, 1320, 1564, 1565, 1569, 1622, and 1623, and wherein RNA interference is induced and Lepidopteran pest mortality occurs.

7. The method of claim 6, wherein said solution further comprises one or more components selected from the group consisting of an organosilicone surfactant or a cationic lipid.

8. The method of claim 1, wherein the target gene of (a), (b), (c), (d) or (e) or the DNA of (f) has a sequence selected from the group consisting of SEQ ID NOs. 7, 9, 21, 26, 27, 29, 87, 95, or 99, or wherein the double-stranded RNA of (g) comprises one strand complementary to at least about 50 contiguous nucleotides, at least about 100 nucleotides, at least about 150 nucleotides or at least about 200 contiguous nucleotides of a sequence selected from the group consisting of SEQ ID NOs: 121, 123, 135, 140, 141, 143, 201, 209, and 213, or a sequence having a least 90 percent, at least 95 percent or 98 percent identity to the selected sequence or to a fragment thereof of equivalent length to the one strand.

9. The method of claim 1, wherein said Lepidopteran pest is selected from the group consisting of: Spodoptera frugiperda and Plutella xylostella.

10. The method of any of claim 1-4, 6 or 7, wherein the at least one double stranded RNA comprises one strand complementary to at least about 50 contiguous nucleotides, at least about 100 nucleotides, at least about 150 nucleotides or at least about 200 contiguous nucleotides of a sequence selected from the group consisting of SEQ ID NOs: 115-228, 362-494, 512-529; 536-541, 823-1103, 1334-1563, and 1624-1683, or a sequence having a least 90 percent, at least 95 percent or 98 percent identity to the selected sequence or to a fragment thereof of equivalent length to the one strand.

11. The method of claim 10, wherein the one strand comprises a sequence complementary to at least about 100 contiguous nucleotides of a sequence selected from the group.

12. The method of any of claim 1-4, 6 or 7, wherein the double stranded RNA comprises at least one sequence selected from the group consisting of SEQ ID NOs: 115-228, 362-494, 512-529; 536-541, 823-1103, 1334-1563, and 1624-1683, or a fragment thereof of at least about 50 contiguous nucleotides, at least about 100 nucleotides, at least about 150 nucleotides or at least about 200 contiguous nucleotides, or a sequence having at least 90 percent, at least 95 percent or 98 percent identity to the double stranded RNA or a fragment thereof.

13. The method of claim 10 or 11, wherein the at least one double stranded RNA comprises one strand complementary to at least about 50 contiguous nucleotides, at least about 100 nucleotides, at least about 150 nucleotides or at least about 200 contiguous nucleotides of a sequence selected from the group consisting of SEQ ID NOs: 115, 116, 119, 127, 150, 151, 153, 158, 161, 217, 434, 442, 451, 452, 453, 454, 456, 457, 461, 474, 476, 479, 489, 491, 492, 521, 522, 523, 524, 527, 528, 536, 538 and 539, 823, 826, 827, 828, 830, 832, 833, 834, 840, 841, 842, 844, 845, 851, 853, 854, 862, 874, 877, 883, 892, 893, 901, 946, 947, 953, 998, 1011, 1012, 1017, 1018, 1019, 1021, 1022, 1023, 1024, 1030, 1038, 1041, 1042, 1044, 1047, 1089, 1090, 1091, 1095, 1096, 1098, 1099, 1102, 1103, 1334, 1335, 1336, 1341, 1343, 1346, 1351, 1353, 1354, 1362, 1363, 1377, 1386, 1387, 1393, 1396, 1417, 1420, 1422, 1425, 1426, 1446, 1447, 1470, 1473, 1481, 1493, 1494, 1495, 1500, 1505, 1509, 1513, 1520, 1538, 1540, 1546, 1548, 1550, 1624, 1625, 1629, 1682, and 1683, or a sequence having a least 90 percent, at least 95 percent or 98 percent identity to the selected sequence or to a fragment thereof of equivalent length to the one strand.

14. The method of claim 1, wherein the target gene of (a), (b), (c), (d), or (e), or the DNA of (f) has a sequence selected from the group consisting of SEQ ID NOs. 2, 5, 13, 36, 37, 39, 44, 47, 103, 301, 309, 318, 319, 320, 321, 323, 324, 328, 341, 343, 346, 356, 358, 359, 503, 504, 505, 506, 509, 510, 530, 532, 533, 542, 545, 546, 547, 549, 551, 552, 553, 559, 560, 561, 563, 564, 570, 572, 573, 581, 593, 596, 602, 611, 612, 620, 665, 666, 672, 717, 730, 731, 736, 737, 738, 740, 741, 742, 743, 749, 757, 760, 761, 763, 766, 808, 809, 810, 814, 815, 817, 818, 821, 822, 1104, 1105, 1106, 1111, 1113, 1116, 1121, 1123, 1124, 1132, 1133, 1147, 1156, 1157, 1163, 1166, 1187, 1190, 1192, 1195, 1196, 1216, 1217, 1240, 1243, 1251, 1263, 1264, 1265, 1270, 1275, 1279, 1283, 1290, 1308, 1310, 1316, 1318, 1320, 1564, 1565, 1569, 1622, and 1623,

15. The method of claim 13 or 14, wherein the Lepidopteran pest is Plutella xylostella.

16. A plant having improved resistance to a Lepidopteran pest infestation, provided by the method of claim 1, or a fruit, seed, or propagatable part of said plant.

17. The plant of claim 16, wherein said plant is a crop plant.

18. An insecticidal composition for controlling a Lepidopteran pest, comprising:
(a) an insecticidally effective amount of at least one polynucleotide comprising a nucleotide sequence that is complementary to at least 18, 19, 20, 21, 25, 50, 100, 150 or 200 contiguous nucleotides, or complementary to a nucleotide sequence having at least 90 percent, 95 percent or 98 percent identity with said contiguous nucleotides, of a target gene having a nucleotide sequence selected from the group consisting of: SEQ ID NOs 1-114, 229-361, 495-511; 530-535, 542-822, 1104-1333, and 1564-1623, or an RNA transcribed from said target gene; or
(b) an insecticidally effective amount of at least one polynucleotide comprising at least one silencing element that is complementary to at least 18, 19, 20, 21 or 25 contiguous nucleotides of a target gene or an RNA transcribed from said target gene, wherein said target gene has a nucleotide sequence selected from the group consisting of: SEQ ID NOs: 1-114, 229-361, 495-511; 530-535, 542-822, 1104-1333, and 1564-1623; or
(c) an insecticidally effective amount of at least one RNA comprising at least one segment that is identical or complementary to at least 18 contiguous nucleotides of a target gene having a nucleotide sequence selected from the group consisting of: SEQ ID NOs: 1-114, 229-361, 495-511; 530-535, 542-822, 1104-1333, and 1564-1623, or an RNA transcribed from said target gene; or
(d) an RNA molecule that causes mortality or stunting of growth in a Lepidopteran pest when ingested or contacted by said Lepidopteran pest, wherein said RNA molecule comprises a nucleotide sequence that is complementary to at least 18, 19, 20, 21, 25, 50, 100, 150 or 200 contiguous nucleotides, or complementary to a nucleotide sequence having at least 90 percent, 95 percent or 98 percent identity of said contiguous nucleotides, of a target gene having a nucleotide sequence selected from the group consisting of: SEQ ID NOs: 1-114, 229-361, 495-511; 530-535, 542-822, 1104-1333, and 1564-1623, or an RNA transcribed from said target gene; or
(e) an insecticidal double-stranded RNA molecule that causes mortality or stunting of growth in a Lepidopteran pest when ingested or contacted by said Lepidopteran pest, wherein at least one strand of said insecticidal double-stranded RNA molecule is complementary to at least 18, 19, 20, 21, 25, 50, 100, 150 or 200 contiguous nucleotides, or complementary to a nucleotide sequence having at least 90 percent, 95 percent or 98 percent identity of said contiguous nucleotides, of a target gene or an RNA transcribed from said target gene, wherein said target gene has a sequence selected from the group consisting of: SEQ ID NOs: 1-114, 229-361, 495-511; 530-535, 542-822, 1104-1333, and 1564-1623; or
(f) an insecticidally effective amount of at least one double-stranded RNA comprising, one strand of which is complementary to at least 18, 19, 20, 21, 25, 50, 100, 150 or 200 contiguous nucleotides, or complementary to a nucleotide sequence having at least 90 percent, 95 percent or 98 percent identity of said contiguous nucleotides, of a sequence selected from the group consisting of: SEQ ID NOs: 115-228, 362-494, 512-529; 536-541, 823-1103, 1334-1563, and 1624-1683.

19. The insecticidal composition of claim 18, wherein the double stranded RNA molecule of (e) or double stranded RNA of (f) comprises one strand complementary to at least about 50 contiguous nucleotides, at least about 100 nucleotides, at least about 150 nucleotides or at least about 200 contiguous nucleotides of a sequence selected from the group consisting of SEQ ID NOs: 115-228, 362-494, 512-529; 536-541, 823-1103, 1334-1563, and 1624-1683, or a sequence having a least 90 percent, at least 95 percent or 98 percent identity to the selected sequence or to a fragment thereof of equivalent length to the one strand.

20. The insecticidal composition of claim 19, wherein the one strand comprises a sequence complementary to at least about 100 contiguous nucleotides of a sequence selected from the group.

21. The insecticidal composition of claim 18, wherein the double stranded RNA comprises at least one sequence selected from the group consisting of SEQ ID NOs: SEQ ID NOs: 115-228, 362-494, 512-529; 536-541, 823-1103, 1334-1563, and 1624-1683, or a fragment thereof of at least about 50 contiguous nucleotides, at least about 100 nucleotides, at least about 150 nucleotides or at least about 200 contiguous nucleotides, or a sequence having at least 90 percent, at least 95 percent or 98 percent identity to the double stranded RNA or a fragment thereof.

22. The insecticidal composition of any of claims 19-21, wherein the group is SEQ ID NOs: 115, 116, 119, 127, 150, 151, 153, 158, 161, 217, 434, 442, 451, 452, 453, 454, 456, 457, 461, 474, 476, 479, 489, 491, 492, 521, 522, 523, 524, 527, 528, 536, 538, 539, 823, 826, 827, 828, 830, 832, 833, 834, 840, 841, 842, 844, 845, 851, 853, 854, 862, 874, 877, 883, 892, 893, 901, 946, 947, 953, 998, 1011, 1012, 1017, 1018, 1019, 1021, 1022, 1023, 1024, 1030, 1038, 1041, 1042, 1044, 1047, 1089, 1090, 1091, 1095, 1096, 1098, 1099, 1102, 1103, 1334, 1335, 1336, 1341, 1343, 1346, 1351, 1353, 1354, 1362, 1363, 1377, 1386, 1387, 1393, 1396, 1417, 1420, 1422, 1425, 1426, 1446, 1447, 1470, 1473, 1481, 1493, 1494, 1495, 1500, 1505, 1509, 1513, 1520, 1538, 1540, 1546, 1548, 1550, 1624, 1625, 1629, 1682, and 1683.

23. The insecticidal composition of claim 18, wherein the group in (a), (b), (c), (d) and (e) is 2, 5, 13, 36, 37, 39, 44, 47, 103, 301, 309, 318, 319, 320, 321, 323, 324, 328, 341, 343, 346, 356, 358, 359, 503, 504, 505, 506, 509, 510, 530, 532, 533, 542, 545, 546, 547, 549, 551, 552, 553, 559, 560, 561, 563, 564, 570, 572, 573, 581, 593, 596, 602, 611, 612, 620, 665, 666, 672, 717, 730, 731, 736, 737, 738, 740, 741, 742, 743, 749, 757, 760, 761, 763, 766, 808, 809, 810, 814, 815, 817, 818, 821, 822, 1104, 1105, 1106, 1111, 1113, 1116, 1121, 1123, 1124, 1132, 1133, 1147, 1156, 1157, 1163, 1166, 1187, 1190, 1192, 1195, 1196, 1216, 1217, 1240, 1243, 1251, 1263, 1264, 1265, 1270, 1275, 1279, 1283, 1290, 1308, 1310, 1316, 1318, 1320, 1564, 1565, 1569, 1622, and 1623.

24. The insecticidal composition of claims 22 and 23, wherein the Lepidopteran pest is Plutella xylostella.

25. The insecticidal composition of any of claims 18-24, wherein said insecticidal composition is in the form of at least one selected from the group consisting of a solid, liquid, powder, suspension, emulsion, spray, encapsulation, microbeads, carrier particulates, film, matrix, seed treatment, soil drench, implantable formulation, and in-furrow formulation.

26. The insecticidal composition of any of claims 18-25, further comprising at least one component selected from the group consisting of a carrier agent, a surfactant, a cationic lipid, an organosilicone, an organosilicone surfactant, a polynucleotide herbicidal molecule, a non-polynucleotide herbicidal molecule, a non-polynucleotide pesticide, a safener, and an insect growth regulator.

27. The insecticidal composition of any of claims 18-26, wherein said insecticidal composition comprises an insecticidal double-stranded RNA molecule that causes mortality or stunting of growth in a Lepidopteran pest when ingested or contacted by said Lepidopteran pest, wherein said insecticidal double-stranded RNA molecule comprises at least one segment that is complementary to 21 contiguous nucleotides of a DNA having a sequence selected from the group consisting of: SEQ ID NOs: 1-114, 229-361, 495-511; 530-535, 542-822, 1104-1333, and 1564-1623, or an RNA transcribed from said DNA, and wherein said double-stranded RNA molecule is at least 50 base-pairs in length or is between about 100 to about 500 base-pairs in length.

28. A recombinant DNA construct comprising a heterologous promoter operably linked to:
(a) DNA comprising a nucleotide sequence that is complementary to at least 18, 19, 20, 21, 25, 50, 100, 150, or 200 contiguous nucleotides, or complementary to a nucleotide sequence having at least 90 percent, 95 percent or 98 percent identity of said contiguous nucleotides, of a target gene having a sequence selected from the group consisting of: SEQ ID NOs: 1-114, 229-361, 495-511; 530-535, 542-822, 542-822, 1104-1333, and 1564-1623, or an RNA transcribed from said target gene; or
(b) a DNA comprising 18 or more contiguous nucleotides having 100% identity to a fragment of equivalent length of a DNA having a sequence selected from the group consisting of: SEQ ID NOs: 1-114, 229-361, 495-511; 530-535, 542-822, 542-822, 1104-1333, and 1564-1623, or the DNA complement thereof; or
(c) DNA encoding at least one silencing element that is complementary to at least 18 contiguous nucleotides of a target gene or an RNA transcribed from said target gene, wherein said target gene has a sequence selected from the group consisting of: SEQ ID NOs: 1-114, 229-361, 495-511; 530-535, 542-822, 542-822, 1104-1333, and 1564-1623; or
(d) DNA encoding a RNA comprising a sequence selected from the group consisting of SEQ ID NOs: 115-228, 362-494, 512-529; 536-541, 823-1103, 1334-1563, and 1624-1683.

29. A plant chromosome or a plastid or a recombinant plant virus vector or a recombinant baculovirus vector comprising the recombinant DNA construct of claim 16.

30. A transgenic crop plant cell having in its genome the recombinant DNA construct of claim 28.

31. The transgenic crop plant cell of claim 30, wherein said transgenic crop plant cell further has in its genome DNA encoding at least one pesticidal agent selected from the group consisting of a patatin, a plant lectin, a phytoecdysteroid, a Bacillus thuringiensis insecticidal protein, a Xenorhabdus insecticidal protein, a Photorhabdus insecticidal protein, a Bacillus laterosporus insecticidal protein, and a Bacillus sphaericus insecticidal protein.

32. A transgenic crop plant comprising the transgenic solanaceous plant cell of claim 30, or a fruit, seed, or propagatable part of said transgenic crop plant.

33. A method for producing a polynucleotide for use in Lepidopteran pest control, the method comprising:
(a) incubating in a reaction mixture cellular ribonucleic acid (RNA) and a ribonuclease and producing 5′ nucleoside monophosphates (5′ NMPs);
(b) eliminating the ribonuclease; and
(c) incubating in the reaction mixture, or in a second reaction mixture, the 5′ NMPs, a polyphosphate kinase, a polyphosphate, a polymerase, and a deoxyribonucleic acid (DNA) template having at least 80% identity to SEQ ID NO: 2, 5, 7, 9, 13, 21, 26, 27, 29, 36, 37, 39, 44, 47, 87, 95, 99, 103, 301, 309, 318, 319, 320, 321, 323, 324, 328, 341, 343, 346, 356, 358, 359, 503, 504, 505, 506, 509, 510, 530, 532, 533, 542, 545, 546, 547, 549, 551, 552, 553, 559, 560, 561, 563, 564, 570, 572, 573, 581, 593, 596, 602, 611, 612, 620, 665, 666, 672, 717, 730, 731, 736, 737, 738, 740, 741, 742, 743, 749, 757, 760, 761, 763, 766, 808, 809, 810, 814, 815, 817, 818, 821, 822, 1104, 1105, 1106, 1111, 1113, 1116, 1121, 1123, 1124, 1132, 1133, 1147, 1156, 1157, 1163, 1166, 1187, 1190, 1192, 1195, 1196, 1216, 1217, 1240, 1243, 1251, 1263, 1264, 1265, 1270, 1275, 1279, 1283, 1290, 1308, 1310, 1316, 1318, 1320, 1564, 1565, 1569, 1622, and 1623, or encoding an RNA sequence that comprises a segment that comprises at least 18 contiguous nucleotides, wherein the segment has at least 90% identity to a segment of a sequence of SEQ ID NOs: 115, 116, 119, 127, 150, 151, 153, 158, 161, 217, 434, 442, 451, 452, 453, 454, 456, 457, 461, 474, 476, 479, 489, 491, 492, 521, 522, 523, 524, 527, 528, 536, 538, 539, 823, 826, 827, 828, 830, 832, 833, 834, 840, 841, 842, 844, 845, 851, 853, 854, 862, 874, 877, 883, 892, 893, 901, 946, 947, 953, 998, 1011, 1012, 1017, 1018, 1019, 1021, 1022, 1023, 1024, 1030, 1038, 1041, 1042, 1044, 1047, 1089, 1090, 1091, 1095, 1096, 1098, 1099, 1102, 1103, 1334, 1335, 1336, 1341, 1343, 1346, 1351, 1353, 1354, 1362, 1363, 1377, 1386, 1387, 1393, 1396, 1417, 1420, 1422, 1425, 1426, 1446, 1447, 1470, 1473, 1481, 1493, 1494, 1495, 1500, 1505, 1509, 1513, 1520, 1538, 1540, 1546, 1548, 1550, 1624, 1625, 1629, 1682, or 1683, and producing the RNA of interest, optionally wherein the reaction mixture of step (c) further comprises a nucleoside kinase, a NMP kinase, and/or a NDP kinase.

34. The method of claim 1, wherein the at least 18 contiguous nucleotides recited in (a)-(g) is at least 18, 19, 20, or 21 contiguous nucleotides.

35. The method of claim 1, wherein said method comprises topically applying to said plant a composition comprising at least one polynucleotide in a manner such that an effective amount of said polynucleotide is ingested by Lepidopteran pests feeding on said plant, said polynucleotide comprising a nucleotide sequence that is complementary to at least 18, 19, 20, or 21 contiguous nucleotides of a target gene having a nucleotide sequence selected from the group consisting of: SEQ ID NOs: 1-114, 229-361, 495-511; 530-535, 542-822, 1104-1333, and 1564-1623, or an RNA transcribed from said target gene; wherein said Lepidopteran pest is Plutella xylostella; and wherein said target gene has the sequence of SEQ ID NO: 2, 5, 13, 36, 37, 39, 44, 47, 103, 301, 309, 318, 319, 320, 321, 323, 324, 328, 341, 343, 346, 356, 358, 359, 503, 504, 505, 506, 509, 510, 530, 532, 533, 542, 545, 546, 547, 549, 551, 552, 553, 559, 560, 561, 563, 564, 570, 572, 573, 581, 593, 596, 602, 611, 612, 620, 665, 666, 672, 717, 730, 731, 736, 737, 738, 740, 741, 742, 743, 749, 757, 760, 761, 763, 766, 808, 809, 810, 814, 815, 817, 818, 821, 822, 1104, 1105, 1106, 1111, 1113, 1116, 1121, 1123, 1124, 1132, 1133, 1147, 1156, 1157, 1163, 1166, 1187, 1190, 1192, 1195, 1196, 1216, 1217, 1240, 1243, 1251, 1263, 1264, 1265, 1270, 1275, 1279, 1283, 1290, 1308, 1310, 1316, 1318, 1320, 1564, 1565, 1569, 1622, or 1623, or wherein said polynucleotide is a double-stranded RNA having a strand with a sequence selected from the group consisting of SEQ ID NO: 115, 116, 119, 127, 150, 151, 153, 158, 161, 217, 434, 442, 451, 452, 453, 454, 456, 457, 461, 474, 476, 479, 489, 491, 492, 521, 522, 523, 524, 527, 528, 536, 538, 539, 823, 826, 827, 828, 830, 832, 833, 834, 840, 841, 842, 844, 845, 851, 853, 854, 862, 874, 877, 883, 892, 893, 901, 946, 947, 953, 998, 1011, 1012, 1017, 1018, 1019, 1021, 1022, 1023, 1024, 1030, 1038, 1041, 1042, 1044, 1047, 1089, 1090, 1091, 1095, 1096, 1098, 1099, 1102, 1103, 1334, 1335, 1336, 1341, 1343, 1346, 1351, 1353, 1354, 1362, 1363, 1377, 1386, 1387, 1393, 1396, 1417, 1420, 1422, 1425, 1426, 1446, 1447, 1470, 1473, 1481, 1493, 1494, 1495, 1500, 1505, 1509, 1513, 1520, 1538, 1540, 1546, 1548, 1550, 1624, 1625, 1629, 1682, or 1683.

35. An insecticidal composition for controlling a Lepidopteran pest, comprising an insecticidal double-stranded RNA molecule that causes mortality or stunting of growth in a Lepidopteran pest when ingested or contacted by said Lepidopteran pest, wherein at least one strand of said insecticidal double-stranded RNA molecule comprises at least 18, 19, 20, 21, 25, 50, 100, 150 or 200 contiguous nucleotides that are complementary to a sequence selected from the group consisting of: SEQ ID NOs: 115-228, 362-494, 512-529; 536-541, 823-1103, 1334-1563, and 1624-1683, or a sequence having a least 90 percent, at least 95 percent or 98 percent identity to the selected sequence or to a fragment thereof of equivalent length to the at least one strand.

36. The insecticidal composition of claim 35, wherein the group is SEQ ID NOs: 115, 116, 119, 127, 150, 151, 153, 158, 161, 217, 434, 442, 451, 452, 453, 454, 456, 457, 461, 474, 476, 479, 489, 491, 492, 521, 522, 523, 524, 527, 528, 536, 538, 539, 823, 826, 827, 828, 830, 832, 833, 834, 840, 841, 842, 844, 845, 851, 853, 854, 862, 874, 877, 883, 892, 893, 901, 946, 947, 953, 998, 1011, 1012, 1017, 1018, 1019, 1021, 1022, 1023, 1024, 1030, 1038, 1041, 1042, 1044, 1047, 1089, 1090, 1091, 1095, 1096, 1098, 1099, 1102, 1103, 1334, 1335, 1336, 1341, 1343, 1346, 1351, 1353, 1354, 1362, 1363, 1377, 1386, 1387, 1393, 1396, 1417, 1420, 1422, 1425, 1426, 1446, 1447, 1470, 1473, 1481, 1493, 1494, 1495, 1500, 1505, 1509, 1513, 1520, 1538, 1540, 1546, 1548, 1550, 1624, 1625, 1629, 1682, and 1683, or a sequence having a least 90 percent, at least 95 percent or 98 percent identity to the selected sequence or to a fragment thereof of equivalent length to the at least one strand

37. The insecticidal composition of claim 35, wherein the double stranded RNA comprises one strand complementary to at least about 50 contiguous nucleotides, at least about 100 nucleotides, at least about 150 nucleotides or at least about 200 contiguous nucleotides of a sequence selected from the group consisting of SEQ ID NOs: 115-228, 362-494, 512-529; 536-541, 823-1103, 1334-1563, and 1624-1683, or a sequence having a least 90 percent, at least 95 percent or 98 percent identity to the selected sequence or to a fragment thereof of equivalent length to the one strand.

38. The insecticidal composition of claim 18, wherein the group in (a), (b), (c), (d) and (e) is SEQ ID NOs: 1, 2, 13, 36, 37, 39, 47, 103, 302, 340, 346, 349, 1121, 1157, 1178, 1179, 1185, 1310, 1313, 1318, and 1322.

39. The insecticidal composition of claim 18, wherein the group in (f) is SEQ ID NOs 115, 116, 127, 150, 151, 153, 161, 217, 435, 473, 479, 482, 1351, 1387, 1408, 1409, 1415, 1540, 1543, 1548, and 1552.

The application's sequence listing, which the Patent Office published only in electronic form, follows.

SEQUENCE LISTING (1683 sequences)

SEQ ID NO: 1 - DNA, 1098 bp, Plutella xylostella
  misc_feature (1)..(1098): PGRP
gccaatatgttaccttgcaatgatgaaaccgccatcaacgaagtccaagaccacttcgcctacaccccgcggcgacagtggcgcgcccgggagcccaccgaacggcgccccctcgcgcgcccggcgccctacgtggtccttcaccactccttcaccccccccgcgtgtgctgatgctgctcagtgtgaggaggccatgagggtcatgcagaacatgcatatggatgggcatgggtgggcggatattgggtataatttcgcggtgggcggcgacggcgcggtgtacgagggccgcggctgggcgctgctcggcgcgcacgcgctgcacttcaacaccgtcagcctcggcgtctgcatcatcggggactggactgattccctaccaccgcggaaccagctcaaagccgtgcaagccctcatagccgaaggcgtggcgcggggagccatcacacccaactaccgcctcgtgggacaccgccaggtccgcgccaacacctcctgtcccggagacgcactcttcaaccacatccagacctggaaacagtactccgcgtttccagcctcctggaaggatctagtcgacgtacctgaactgcccaagagtgatagggatgtggtgcgtaggagcttattggaattgtgatggtatttggttatagcagtatgttttaataagtgggggttggaggtcttatcagcatcatagttaaatttatacttagttacttatctgttttgtatactattcatttgaatttctttaggctggtttaccagtaccagtaggcaatgcgtaaggctgccgctgcaataatttacaaaaaaccgatacgccgctaactcagttggtggtgaacagtttacctactggaaacgcagcccttgactaacaaaataagtaatggtatgtataacctaaattgtagattaccatgtgaaacatagtaattattgtctacattttatgaatagctacttattctaattctacacagaacataatatgtaggcaccgcgaatctatagatatacttagtaaatgtataaaataataataggtaagtacccataatatgtttgtaataagtcaaatgcttca

SEQ ID NO: 2 - DNA, 1718 bp, Plutella xylostella
  misc_feature (1)..(1718): VATpaseE
attttctggctcaatatcggtagtttacgtgttagtagtgtttaatatcaggcagcaaccatggcgctcagcgatgcagatgtccaaaaacagatcaagcatatgatggccttcatcgagcaagaggcaaatgaaaaggccgaagaaatcgatgctaaggctgaggaggagttcaacatcgagaaggggcgtctggtgcagcagcagcgcctcaagatcatggagtactacgagaagaaggagaagcaggtggaactccagaagaagatccaatcctccaacatgctgaaccaggcccgtctgaaggtgctgaaggtgcgcgaggaccacgtgggccacgtgttggacgagacgcgccgccgcctcgccgaggtgcccaacgaccaggggctctactccgacctggtggtcaagctcatcgtgcaggcgctgttccagctggttgagccaaccgtaaccctccgcgtgcgcgaggccgacaagccgctgatcgacagcctgctcgagcgcgcgcaggcgcagtacaaggagaagatcaagaaggatgtgaccttgaaggtggacacggagcactacctgccggtgggcacctgcggcgggattgagttggtcgccgctaggggccgcatcaagatcatcaacaccctggagtcgcgcatggagctgatcgcgcagcagctgctgcccgagatccgcacggcgctgttcggacggaaccccaaccgcaagttcaccgactaaacaccaaccctcaaccaacgcgccccccgcgcaaatattcaactttcttattattattatgtagaactaaaatgttatttataagtgttttactttttgcctaattaattacttacttatatgtataatattaaatgcgtacaacattattaacatgtatgaaagaatccgtattaagtcagaaaatgtattacaatagtaagtgcgatcatgtggatttctgatttcgtggtaggtttaacgttcactcttaatgtacattagttaccgccttaacgtaatgttcgaacagtgtctaagtattatattactacaattcattcgtgtaacactagttatattatattagcttagctgtagcttttaggagacacagttaaattgaaatgttataccgatgcttgatggtaggacaaacttattggtgtgtaagcgtaagcattttattgatataattctggattgttgccataacaattattacacaaatagatgttatcgatagtcgatgtaatggagtaagtgacagcgcactttcgatggaaaaagcacaagttacaaacttcacgacagggcgacgtcaatacttagatatataaatgtggtaaagttcaatgtattttcatataatcttccttgtattttggactcgtctatatatactgtttactatcgtggacttcctgggaattatttgatgctgtaaggtttatgggtgacggcagcatcccgccttattcccactgaaatcgaagtgaaagatttgactgggcgcagggcggtgtcacccatacatctttcagctgaaaaagacattcctctttcatgtttcctgtcctggcaatcaaatgtttcggcttgcttttaacagttctatcgaagagcaccgtagctctataaattacataacgaatataatgtttaatccccattatggcactgttaaaattcttatgtaaatatatagctaaaaaaaa

SEQ ID NO: 3 - DNA, 2086 bp, Plutella xylostella
  misc_feature (1)..(2086): ABCE
cgcggctaacttcatttctgttccttttgacgttcgagttcggagtaaaaggacacgcgaacataggcaaattttgcctacgttcgccttcttttctcagttatgtctcggcatagcaacaagcagcatgaggagacggacaagctaacgcgtatagctatagtgaacgcggatcgttgcaagcctaaaagatgcaggcaagagtgcaagaagagttgcccggtggtgaggatggggaagctctgtatcgaggtgacgcccaacgacaagatcgccaccatctccgaggagctgtgcatcggatgcggtatctgtgtgaagaaatgtccatttgatgctattaccatcatcaacattccttccaacttggagaagcacaccactcaccgttactccaagaactcattcaagctccaccggctgccgatcccccggcctggtgaagtgctgggtctggtcgggcagaacggtattggcaagtccacggctctgaagatccttgctggcaagcagaaacccaaccttggtcgtttctctgaccctccggactggcaggagatcctctcccacttccgcggctcagagctgcagaactacttcaccaagatcctggaggacgacctgaaggcgctgatcaagccgcagtatgtggaccagatccccaaggccgtgaagggaaccgtcggcttcttgctcgacaagaaggatgagctgaagaaccagacacagatatgcaagatgcttgacttgtcccacatccgtgggcgcgagatcgcggctctgtccggcggggagctgcagcggttcgccatcgcgatggtgtgcatccaggacggggacatcttcatgttcgacgagccctcctcctacctcgacgtcaagcagaggctcaacgcggccaggaccatacgctcgctgatacaccctgataagttcatcatagtggtggagcacgacttgtcggtgctggactacctgtcggacttcatctgctgtctgtacggcgtgcccggcgcgtacggcgtcgtcactatgcccttctctgtacgagaaggtatcaacatattccttgatggtttcgtgccgactgagaacatgagattcagaactgaatccctagtattcaaagtagctgaatctgctacagaagaagagataaaacggatgaaccattatgagtatccagagatgacaaagaaaatgggtgacttcagtcttagggtcaagcaaggagagttctctgactccgagatcttggtgcttctcggagaaaatggaactggaaaaaccacattcatcagaatgttggctggcaacttggaacccgatgatggctcgggccacctgccgcagttgcacattagttataagccacagaagatctcgcccaagtcgcaggggctggtgcgtcagctgctgcacgagaagatcagagacgcctatattcacccgcagttcatcacagatgtgatgaagccaatgaagatagaggagataatggaccaggaggtgcagaacctgtctggaggagagttgcagcgtgtggcgctggtgctgtgtctcgggaagcccgccgacgtctacctgattgatgaaccctcggcctacttagattctgagcaacgtcttgttgctgctaaagttattaaaagattcatcctgcacgccaagcggacaggcttcgtggtggaacacgacttcataatggcaacatacctggcggaccgcgtgatcgtgttcgagggcaccccctcgtcggacgccaccgcgcacgcgccgcagtcgctgctcaacggcatgaacaagttccttgaactgctgggaattaccttcaggagagacccgaacaacttccgccccaggatcaataagcactcgtctgttaaggacattgagcaaaaacgggctggccaatacttcttcctggaagactaaaacggacactgtaaagagttatcaatatgtatatttatttatatatgttgggctgttgtatgtatgtatgctgctgcgtagtcactgtcacaatgaaggtggctaacatttaccatccttgtattttattgtaataaatcaattttataca

SEQ ID NO: 4 - DNA, 1686 bp, Plutella xylostella
  misc_feature (1)..(1686): TH
atggcagcagtagcagcagcccagaagaaccgcgagatgttcgccatcaagaagtcctacagcatcgagaacgggtacccgtctcgtcgccgttcgctggtggacgacgctcgcttcgagaccctggtagtcaagcagaccaagcaaagcgttttggaggaggcccgtgcccgcgccaatgactctggcttggattccgaacttatccaagacgatgtcctgattggcaccggcgctgtcactccaactgttgaggtgggcactcagcaggacgacactaaagatggtcaactcgccgatgcggaggtcggtggaatagacggaaatgcagatgacgattacaccttgaccgaggaggaggtgatcttgcagaactccgccagcgagtccccggaggccgagcaggcgctgcaacaagcggctttgcttctgcgcctgcgcgacggcatgggctcgctcgcgcgcatcctcaagaccatcgacaactacaagggctgcgttcaacacctcgagacccgcccctccaacgccaacgacatccagttcgatgctctcatcaaagtgagcatgtctcgcggcaacctgctccaactcatccgatctctccgccagtccaccgccttcgccggcgtcgacctcatctccgacaacgtctccagcaagaccccgtggttccctcgccacgcttccgacctcgacaactgcaaccacctgatgaccaagtacgagcccgagctcgacatgaaccaccccggcttcgcggacaaggagtaccgcgcgcgcaggaagaccatcgccgagatcgccttcggctacaagtacggcgacccgatcccgcatatcgtgtacacggagaccgagaacaacacgtggtcgcgcgtgttcaacacggtgctggacctgatgcccaagcacgcgtgccgcgagtacaaggcggcgttcagcaagctgcagggggacgacatcttcgtgcctcaccgcatcccgcagctggaggaagtgagcaacttcctgcgcaagcacacgggcttcacgctgcgcccggccgccggcctgctcacggcgcgcgacttcctcgcctcgctcgccttccgcgtgttccagtccacgcagtacgtgcgccacaacaactcgcccttccacacccccgagcctgactgcatccacgaactcctcggccacatccctctgttggccgacgccagcttcgcccagttctctcaggagatcggtctcgcttctttgggagcctctgacgctgaaatcgaaaaactgtctaccgtgtactggtttacggtggagtttggtctctgcaaggagaaccagcaactgaaggcttacggcgccgctctcctgtcttccatcggggagctccttcacgcgctgagtgacaagcccgagctgaggtccttcgagcccgcgtccacctccgtgcagccctaccaggaccaggagtaccagcccatttactacgtcgctgagagcttcgaagatgccaaagacaaattcagacgctgggtgtcaaccatgtctcggccgttcgaggtgcgcttcaacccgcacacagagcgtgtggaagtgctggactccgtggagcagctcgagaccctcatctcccagctcaacaccgagatgctccacctcaccaacgccgtcaagaagctcaagggctcccacttcgagtga

SEQ ID NO: 5 - DNA, 1245 bp, Plutella xylostella
  misc_feature (1)..(1245): Hemolin
atgactttaattttcaagagtgttttatttttgggcttaatattgactacttttattgtttccgctcagcctgtgaaacaagatggcggctcagcacacgaagaaatattgttccgtgagcacggccagccggtggtgttgacctgcgcgcgcgcagacgaccccaaccaaggtggcattagaacgtggttgagaaacgggacgccattagaagacggcaaaatgtctcccgaaataaaattcctcgacgacaaatcacttctggtgttgcagccctcaccagccgtggaaggggtctaccaatgcttcaccgaaacccataagggcattgcaacctccccgaaattcagcgtgaaacagacttatctcaaagctccagagactacgccttcagtcaatatcaaaccagcaaaaggccttccctttagcttggactgtgacgtccctgaaggatatccgaagcctgaagtgcaatggttcctacaacacgggaaagatcacaccctgattgaggcaattatcaataaacggatcacacaggctccgaacggagctctttacttctcaaatgctacaaccgaagatgtgaatgtgggagactttagatacgtctgtatggcgaggaatgatgcggtagacttaccagtggtggtgtcggaagctgtcatcacaggtctgagcagcgagggtggtaagggtagattggtggagcagtacgtcagtaaagaagttagggcggttgcgggggagaccacagcgctattttgcattttcggtggcaccccactagcccacccagactggacgaaagacggcaagaatgtgaacggggcgcccggcgaccgagtgacccgacacaacaggagctcaggaagacgactcatcatcaagaacaccactctagaagatgctggaacttaccagtgcgccgttgacaacggcgttgggactgaaatgcgttctgtcaaggttactgttgaagcgaaaccttcaataacgattgtgaatgaagtagcagcgaagcttggagaagaagtcaagatttgcgaagcgaccggagtcccaacgccaaaactaacgataactcacaacgctaaaccgttggttgcgtcaaataacgttgttataaccaacgatggagttgttataaagaatattcaggctattgatcgagggtattatgggtgtgatgctgtcaacgagctaggaagcgaatttcgtgaaacttatctaagtattgcctga

SEQ ID NO: 6 - DNA, 566 bp, Spodoptera frugiperda
  misc_feature (1)..(566): TH
gccgtcgcagctgcccagaagaaccgcgaaatgttcgccatcaagaagtcctacagcatcgagaacggttatccgtctcgtcgccgctcgctcgtagacgatgccaggttcgagacactggttgtcaaacagaccaaacaaagcgtactggaagaagcacgcgcccgcgccaatgactctggcttggattccgattttatccaagacgggattcatattggcaatggtgataactcgccgactgtcgaagatggcacccaacaagacgagactaagaacggtcacctcgctgatgctgatatcggcgacgatgcgggaaaaacggcgaggactatactctgaccgaggaagaagtaatcctgcaaaacgcagcgagtgaatctcccgaggcagagcaggctatccaacaagccgcgttattgctacgcatgcgagatggaatgggctcactggctcgcatcctcaagaccatcgataactacaagggatgcgtgcagcatctcgaaactcgtccttccagctgaccggcgtccagttcgatgcctcgtcaagttagcatgtctcgc

SEQ ID NO: 7 - DNA, 1256 bp, Spodoptera frugiperda
  misc_feature (1)..(1256): Hemolin
atgtcagcaatgaagagcgtaattttggccgcgtgcatagttttatgcacggcccaacccatagaaaaatcagagacaaagctccctgtcttgaaggcgcaacctgctgaagtgctgttcaaagccgacaactactccaccgtactcctggagtgcaccactgaaggaaaggagaaagatgtcaaatacacctggctgaaaaacggcaaacctttcgactgggaaaaggctggacacatcgcccaacgcccaggagaaggcagcatcatgttcttcaaccctaaaccagaagacgaaggcatataccaatgcctggtcgaaacaccagccggaactgcmagtacwcgccagatmcwactaaagcgcgctttcatcaacrccccacaagtaaaaacccaggaatacactccagttgaaggaaaaccgttcaaattggactgccctattccagaatcttacccwwaaccgaaratagtttggaagactcaacttcgctccgacccaagtatcgtcgaagagtttttgagccgcagaatcactttatctcctgatggcacgctttggttttctaatgtaaccgaatctgacatcagtcccagcttcaaatatgtctgcttcgcccaatctcctgcttctggtgaggatgtggtgttggctgaacattttttgaagtctttggygcasgataagggycctaaggatggsgagctgactcctcagtaygttagcaaygatatggtwgctaagactggtgaygtcacyatgttctactgcatctatggtggaactcctctaggcttcgtaacctggtacaaggatggaaaggaaattgatgccaagccaggagacagagtaacagaccacaaccgcaccagtggcaagaggctgctcatcaaggagactctactggaagaccagggagagtacaagtgcgtggttggcaatggagttggcaagaaacaaactcacaccatgaagttgactgttgtcagtgctccaaaactctcaaagtcagcggaaaagcagatcaacgtgaaagaaggtcaagatgtcgccattccctgccaagttaccggtttgccggagcctaaggtgtcttggacatacaacgccaagtctctaggcgagagggcaatttacaaagatggtgttttgaccatcaagaacgccaaaaaggcgatactggctattacggatgcaaagccgaaaatgaacacggagatttgtactccgaaactttagtccatgtcgcttag

SEQ ID NO: 8 - DNA, 681 bp, Spodoptera frugiperda
  misc_feature (1)..(681): vATPasesubE
atggcgctcagcgatgcagatgttcaaaaacagatcaagcacatgatggccttcatcgagcaagaagccaatgaaaaggctgaggaaatcgatgcaaaggccgaggaggagttcaacatcgaaaaggggcgtctggtccagcagcagaggttgaagatcatggagtactatgagaagaaggaaaagcaggtcgaactccagaaaaagatccaatcctcaaacatgctgaaccaggctcgtctcagggtgctcaaagtacgtgaagaccatgtacgcaacctgttggacgaggcccgcaagcgcctggctgaagtacccaaagaccagaagctgtacactgacctgctgaccgcactcatcgtacaggccctcttccagctgatggagcccgcagtgaccctgcgtgtccgtcaggcagacaagtccttggtggagtcagttctgtcaaaggcccagagcgactacaaagctcagatcaagaaggacactgtattgaagatcgacactgacaactggctgtcacctgacacctgcggtggaatcgagcttatcgctctcaagggacgcatcaagatctgcaacaccctggagtctcgcctggagttaatcgcccagcagctgctgcctgagatccgtaccgccctcttcggccgcaaccctaaccgtaaattcaacgattaa

SEQ ID NO: 9 - DNA, 1351 bp, Spodoptera frugiperda
  misc_feature (1)..(1351): ABCE
gaccctccggactggcaagagatcctctcccacttccgtggctctgagctgcagaactacttcacgaaaattcttgaagatgatttgaaggctttgatcaagcctcaatatgtggaccaaatccctaaggccgtcaagggcactgtcggtcaactccttgacaagaaagatgaaagaaaaaaccagactgaaatttgtaaaatgctggatctatcgcacatccgcgatcgtgagatcgccgccctgtctggtggagagctgcagcgctttgcttgcgctatggtgtgcatccagaatggagacattttcatgtttgatgagccctcttcttacttggatgtcaagcagcgtcttaacgctgcccgcacaattcgatcactcatccatcctgacaagtttattatagtggtggagcacgacttgtcagtgttagactacttgtctgacttcatttgctgcctgtatggcgtacccggtgcttacggtgttgtgactatgcctttctctgtaagggaaggtattaatatattccttgatggatttgtccccaccgaaaacatgagattcagaactgaatcgctagtatttaaagtcgccgagtccgctactgaagaagagatcaaacgaatgaaccattatgaatacccagaaatgtcgaaattgatgggtgacttcagtttgaaagtacatcctggagaattctcagattctgaaattctagtgttgctgggagagaatggtactggcaaaactacattcattagaatgttggccggcaatttggaacctgatgaaggttcgggctcactaccccagctgcacattagttataagccacagaagatatcgcccaagtcacagggtttggtgcgcagcttactgcatgacaagattagggatgcttatatacatccacagtttatcacagatgtgatgaagccaatgaaaatagaggagattatggaccaggaggtgcaaaacctgtctggtggtgagttgcagagagtggccctggtgctctgcctcggcaagccagccgacgtctatctaattgacgagccctctgcctacctggactccgaacaacgtttggtagctgctaaagttattaaaaggttcatcctccacgcaaagcgtacaggcttcgtagtagagcacgatttcataatggcgacgtacctggcggaccgtgtgatcgtgttcgaaggcactccctcggcgcatgccactgcgcacgccccgcagtctctactcaacggcatgaaccgattcttagaattactcggcatcaccttccgaagggatcccaacaacttccggccgaggataaacaaacatgcttctgttaagg

SEQ ID NO: 10 - DNA, 1351 bp, Spodoptera frugiperda; identical to SEQ ID NO: 9
  misc_feature (1)..(1351): ABCE

SEQ ID NO: 11 - DNA, 1134 bp, Spodoptera frugiperda
  misc_feature (1)..(1134): IAP
atgtggtcgtgttccttaccttgttggaatacaaaaaaatctggattacaaatggatattaccaaagtggcatccaatggctcctcctcaacattaacgctattcaagagcggatcgcttgaggctaaaattcgacctctcgcgccactaatgctgccgacgccaagttacgactccaacgccggctctccatctttgtcaccatccacgccttgttcttcatcttctttctccattgataaaaccgacaaccacgacaccttcggcttcagtgcggacacagttgatatgagaaaagaggatgaacgtatgaaaacatttgaaaaatggcccgtcagttttctatccggagagcaacttgctcgaaatggattttactacctcggccgtggagatgaagtccgttgcgctttctgtaaagtggagattatgaggtgggtggagggcgatgaccctgcgaaggaccatcagcgttgggcgccacaatgcccatttgtgcgaaaattgaacggtactgcagcagcagacacgggtagttcgggccaggacgagtgtggagcacgcgccgctccctccggtacctctccgccgcgtatggccggacccgtgcacccacgatatgcatctgaagccgcacgactacgcagttttaaagactggccacgatgcatgcgacaaaaacctgaagaactcgcagaggctggctttttttacactggtcagggagacaaaaccaagtgtttttattgcgatggtggattaaaagattgggagaaccatgacgtaccctgggaacaacacgcaaggtggtttgaccgttgcgcctacgtgcaattggtgaagggtcgagaatacgttcaaaaggtgatttctgaagcttgtgaggtttccgcgtcagaagcggaacgtgatgtagcacccgcacggactgccgaaccaagcccgccagcagaggcgccagaaaactcagtcgatgactcaaagttgtgtaaaatctgttaagctgaagagcgtaacgtgtgcttcgtgccgtgcggccacgtggtggcttgcgccaagtgcgcgctggcggccgacaagtgccccatgtgccgcaggacgtttcaaaatgcagtgcggttatatttctcgtga

SEQ ID NO: 12 - DNA, 636 bp, Plutella xylostella
  misc_feature (1)..(636): PGRP
atgttaccttgcaatgatgaaaccgccatcaacgaagtccaagaccacttcgcctacaccccgcggcgacagtggcgcgcccgggagcccaccgaacggcgccccctcgcgcgcccggcgccctacgtggtccttcaccactccttcaccccccccgcgtgtgctgatgctgctcagtgtgaggaggccatgagggtcatgcagaacatgcatatggatgggcatgggtgggcggatattgggtataatttcgcggtgggcggcgacggcgcggtgtacgagggccgcggctgggcgctgctcggcgcgcacgcgctgcacttcaacaccgtcagcctcggcgtctgcatcatcggggactggactgattccctaccaccgcggaaccagctcaaagccgtgcaagccctcatagccgaaggcgtggcgcggggagccatcacacccaactaccgcctcgtgggacaccgccaggtccgcgccaacacctcctgtcccggagacgcactcttcaaccacatccagacctggaaacagtactccgcgtttccagcctcctggaaggatctagtcgacgtacctgaactgcccaagagtgatagggatgtggtgcgtaggagcttattggaattgtga

SEQ ID NO: 13 - DNA, 681 bp, Plutella xylostella
  misc_feature (1)..(681): vATPaseE
atggcgctcagcgatgcagatgtccaaaaacagatcaagcatatgatggccttcatcgagcaagaggcaaatgaaaaggccgaagaaatcgatgctaaggctgaggaggagttcaacatcgagaaggggcgtctggtgcagcagcagcgcctcaagatcatggagtactacgagaagaaggagaagcaggtggaactccagaagaagatccaatcctccaacatgctgaaccaggcccgtctgaaggtgctgaaggtgcgcgaggaccacgtgggccacgtgttggacgagacgcgccgccgcctcgccgaggtgcccaacgaccaggggctctactccgacctggtggtcaagctcatcgtgcaggcgctgttccagctggttgagccaaccgtaaccctccgcgtgcgcgaggccgacaagccgctgatcgacagcctgctcgagcgcgcgcaggcgcagtacaaggagaagatcaagaaggatgtgaccttgaaggtggacacggagcactacctgccggtgggcacctgcggcgggattgagttggtcgccgctaggggccgcatcaagatcatcaacaccctggagtcgcgcatggagctgatcgcgcagcagctgctgcccgagatccgcacggcgctgttcggacggaaccccaaccgcaagttcaccgactaa

SEQ ID NO: 14 - DNA, 1833 bp, Plutella xylostella
  misc_feature (1)..(1833): ABCE
atgtctcggcatagcaacaagcagcatgaggagacggacaagctaacgcgtatagctatagtgaacgcggatcgttgcaagcctaaaagatgcaggcaagagtgcaagaagagttgcccggtggtgaggatggggaagctctgtatcgaggtgacgcccaacgacaagatcgccaccatctccgaggagctgtgcatcggatgcggtatctgtgtgaagaaatgtccatttgatgctattaccatcatcaacattccttccaacttggagaagcacaccactcaccgttactccaagaactcattcaagctccaccggctgccgatcccccggcctggtgaagtgctgggtctggtcgggcagaacggtattggcaagtccacggctctgaagatccttgctggcaagcagaaacccaaccttggtcgtttctctgaccctccggactggcaggagatcctctcccacttccgcggctcagagctgcagaactacttcaccaagatcctggaggacgacctgaaggcgctgatcaagccgcagtatgtggaccagatccccaaggccgtgaagggaaccgtcggcttcttgctcgacaagaaggatgagctgaagaaccagacacagatatgcaagatgcttgacttgtcccacatccgtgggcgcgagatcgcggctctgtccggcggggagctgcagcggttcgccatcgcgatggtgtgcatccaggacggggacatcttcatgttcgacgagccctcctcctacctcgacgtcaagcagaggctcaacgcggccaggaccatacgctcgctgatacaccctgataagttcatcatagtggtggagcacgacttgtcggtgctggactacctgtcggacttcatctgctgtctgtacggcgtgcccggcgcgtacggcgtcgtcactatgcccttctctgtacgagaaggtatcaacatattccttgatggtttcgtgccgactgagaacatgagattcagaactgaatccctagtattcaaagtagctgaatctgctacagaagaagagataaaacggatgaaccattatgagtatccagagatgacaaagaaaatgggtgacttcagtcttagggtcaagcaaggagagttctctgactccgagatcttggtgcttctcggagaaaatggaactggaaaaaccacattcatcagaatgttggctggcaacttggaacccgatgatggctcgggccacctgccgcagttgcacattagttataagccacagaagatctcgcccaagtcgcaggggctggtgcgtcagctgctgcacgagaagatcagagacgcctatattcacccgcagttcatcacagatgtgatgaagccaatgaagatagaggagataatggaccaggaggtgcagaacctgtctggaggagagttgcagcgtgtggcgctggtgctgtgtctcgggaagcccgccgacgtctacctgattgatgaaccctcggcctacttagattctgagcaacgtcttgttgctgctaaagttattaaaagattcatcctgcacgccaagcggacaggcttcgtggtggaacacgacttcataatggcaacatacctggcggaccgcgtgatcgtgttcgagggcaccccctcgtcggacgccaccgcgcacgcgccgcagtcgctgctcaacggcatgaacaagttccttgaactgctgggaattaccttcaggagagacccgaacaacttccgccccaggatcaataagcactcgtctgttaaggacattgagcaaaaacgggctggccaatacttcttcctggaagactaa

SEQ ID NO: 15 - DNA, 1686 bp, Plutella xylostella; identical to SEQ ID NO: 4
  misc_feature (1)..(1686): TH

SEQ ID NO: 16 - DNA, 1245 bp, Plutella xylostella; identical to SEQ ID NO: 5
  misc_feature (1)..(1245): Hemolin

SEQ ID NO: 17 - DNA, 164 bp, Plutella xylostella
  misc_feature (1)..(164): IAP
tcgacgactccaagctgtgcaagatctgcttcgcggaggagcgcaacgtgtgcttcgtgccgtgcggccacgtggtggcgtgcgcgcgctgcgccctgtccacggacaagtgccccatgtgccggaggactttccagagtgcggtgcggttgtactactcgtga

SEQ ID NO: 18 - DNA, 699 bp, Spodoptera frugiperda
  misc_feature (1)..(699): Proteasome beta
atgttgagtgttaatgaaaactttcccgaatatgcagtgcctggagctaaacaagttcgttttgaaccctacgctgataatggcggcagcattgttgccatcgccggtgatgactttgctgttattggtgctgatacacgtctgagtacgggtttctccatctatacaagggaacagaagaaactatttaagctttcggacaaaactgtcttgggtgcaacaggctgctggtgcgacactctcactctgacccggctgctttcagcaaggatgcaaatgtacgagcacgaacataacaagtcaatgtctacaccagccgtcgctcaaatgctctccacgatgctgtattacaagcgtttctttccatattatgtatcgaatgtcctggctggtttagacgcggacggcaaggggtgtgtctacagctacgatcctattggtcattgtgagcgctccaactaccgcgctggtggatctgcaggtgctcagctacagccattgctggacaatcaaattggtctcaagaacatgcagaatgtaactgaagctcccatacctaaagaaaaggctttggccttgttgaaggatgtttttattagtgctgctgagcgtgatatttatactggagactgcatctacattctaattatcactgcaagtggcatccaagaagaaaagtttgagttgcgtaaagattaa

SEQ ID NO: 19 - DNA, 1245 bp, Spodoptera frugiperda
  misc_feature (1)..(1245): RpII 140
agatccatggaatatctacggtttagagaattgcctgcaggcattaattcgatcgtagcaattttgtgctatacaggatacaatcaagaagatagtgttattttgaatgcatcggctgtggaaagaggattcttccgctccgtgttttacagatcttataaggattcagaatctaaaaggattggtgaccaagaggaacagtttgaaaaacctactcgacaaacatgtcaaggcatgagaaacgctttgtacgataaattagatgatgatggcatcattgcgccgggtataagagtatctggtgatgacgtagttattgggaaaacaatcacattgcccgaaaatgatgatgaattagaaggcacaacaaaacgttacacaaaacgtgatgcatcaacatttctacgtaatagtgaaactggtattgtcgaccaggtgatgttaacactaaatagtgaaggctacaaattttgcaaaattcgcgtcagatcagtgcgtattcctcaaatcggggacaagtttgcttctcgtcatggacaaaaaggaacttgtggaattcagtacagacaagaagatatgccatttacttgtgagggtataacccccgatattattattaatccacacgctatcccatctcgtatgacaattggccatttaattgaatgtatccaaggcaaagtatcttctaacaaaggagaaattggtgatgcaacaccattcaatgatgctgtaaatgtgcagaaaatatcttcgctacttcaagagtatggataccatctgcgtggcaatgaagttatgtataacggacatacaggtcgaaagataaatgcccaagtctttttgggtcccacatattaccaacgtctgaaacacatggtggatgacaaaatccattcaagagctcgaggacctgtgcagattttagtaaggcaacctatggagggcagagctagagatggtggattacgtttcggagaaatggaacgggattgtcaaattgctcatggcgcggcacaattcttacgtgaacgtcttttcgaagtttctgatccttatcgtatacacgtttgcaacttctgtggtcttattgcgattgcaaacttgagaaataatacctttgaatgtaaaggatgcaagaataagactcaaatatcgcaaataaggttgccttatgctgcgaagttattgttccaagaactgatgtccatgaatattgcgccaaggttgatggttgtaaattaa

SEQ ID NO: 20 - DNA, 1724 bp, Spodoptera frugiperda
  misc_feature (1)..(1724): Rop (Ras opposite)
agattatgaatgaggtgatccggtaccggtcaaagggaaaggataaaatagaatggcgagttcttgtggtcgaccagttgtctatgcgcatggtgtcagcatgctgcaaaatgcacgacatctctgcagaaggcatcactttggtggaagacatccacaagaagagggagccactgtgcaccatggacggcatctacctcatcactccatctgaaaaatcagtccatgcactcatcaatgacttctcagtgggcaaccgcatcatgtacagggctgcccatgtcttcttcactgaagcttgtcccgatgcacgatttgacgaattatctcgtagtcctgtagctaaatatatcaaaacattaaaggaaatcaacattgcttttattccctatgaacaacaggtgttctccctggattcgcctgagacattccagtgcatgtacaacccagcactggctcagactcgcaatgccaacatggagcgcattgccgagcagatcgccaccctctgcgctactctcggagagtacccctcagtacgataccgcagtgactgggaacgcaatgtcgaactcgctcagctgatccaacagaagcttgatgcctacaaggccgacgagccgacaatgggcgaagggccagagaaggctcgctctcaactgctggtcattgatcgcggttttgattgcgtgtcgcctttactgcatgagctgactcttcaagccatggcatacgatctcttgccaattgagaatgatttaactttatatgactcgtctggaaatatgaaggaagtactgctggatgagaacgacgagctgtgggtggaactgcgacaccagcatattgctgtcgtatccacatcagtcaccaagaacttgaagaagttcactgaatccaaacgcatgggtggaggagacaagcagtccatgcgcgatctctcccagatgatcaagaagatgcctcagtaccaaaaggagttgtccaagtacgccacacatctgcgcctcgctgaagactgcatgaaggcctaccaaggctacgtcgacaaactctgcaaagttgaacaggatcttgctatgggtactgacgctgagggcgagaaaatcaaggatcacatgagaagcattgtgcctgtgcttcttgatcaggcagtgatcaacttcaacaagatgcgtatcatcgcactatacatcatgtccaagaacggtatctctgaggagaacttgaacaaactggtgacgcatgcgcaactcgaaccctctgacaagcagaccttgcttaaccttgccaacttgggactcaatgtcgtggttgatggcaacagaaagaagcaatatcaagtacccaggaaggagaggatcactgagcaaacataccaaatgtcaaggtggacacctgtgatcaaggatatcatggaagacgcgattgaagataagctggatcaacgtcacttcccattcttggctggacgcgcccaaacttcaggataccaggcacccactagcgtgcgctacggacactggcataaggacaaggcgcagcagactattaagaacgtgccgcgactgattgtcttcgttgttggaggcgtctgcttctctgaaattcgctgcgcgtacgaggtgacagctgcgcttaagaactgggaggtgattatcggctcgtcccacatactgacccctgacaacttcctgtcagacctcagctctctaaccgcctaa

SEQ ID NO: 21 - DNA, 686 bp, Spodoptera frugiperda
  misc_feature (1)..(686): Voltage-gated potassium channel
ggaattaataacgacgttgtacattgggttccttgggctgatattcgcctcatttctggtatacttagctgaaaaagacgtcgccgacacaaagttcaaaaatttcgccgaggctttgtggtggggtgtgatcacgctgtgcacggtggggtacggcgacatggtgccgcagacctggcagggcaagttcatagcctccttctgcgcactgctcgggatctctttcttcgcgctgcccgccggaatactgggctctggttttgcgctcaaagtccaacagcagcaacgtcagaaacatatgattcggcgacgtcagccggctgccacgctgatccaggcgctgtggcggtgctacgccgccgacgagcactccatgagtgtggccacttggaaaatacaccaagtacctcttcctagtccgcaagccagccgcgtgatgagtgcgtcgttcaagaacaatgcatcctttgtgtcgcgcctgccgactatccgccgccacaagagtacgtccctgcactctccagcgccgcactccaagcccgcgcatagatacgatgtcaatgccagcgcagaaaatctgggcgctactgcggctcggccggcgcgcgcgccgcctgtccaaccggcacacagcgaggactcggtcgcagagacaccgctctccaagaaaaactctgatggtaaga

SEQ ID NO: 22 - DNA, 816 bp, Spodoptera frugiperda
  misc_feature (1)..(816): Rieske
atgacttcggtcacaagggctgggcatttggctccttactttaaggcgacctcatcggtggtttccaatggcctgaagcctctggtagtggcgcacacgccagcagagaaggtgttggtgcaccctttgccaaaaacctccactgtggagtctctgcatggatccttgcctatccagggcttgaaggctagagtgaatggtcgcggaccaagtcatgttcgtttcgcgcataccgatattgggtaccccgacttctcggcttaccgccgcaaggagacccaggaaccgaccgcgaaggccgccgaaaatgttgatggacgtcaatccttcacctatctcatcgctggagccggtggtgtcgctggtgcgtatgctgccaagtcgatagtgacacactttgtgtcatcgatggctgccgctgccgacgtcttggctttggccaagattgagatcaagctgtctgaaatccccgagggcaagtctgttaccttcaagtggcgtggtaagccgctgttcatccgtcacagaaccgaaaacgagatttccaccgagcaggccgtgcctgtggacaccctgcgtgaccctcagcacgacaaccagcgcacacagaaccctaagtggctggtggttatcggagtgtgcacccatcttggatgcgtacccgtcgccaacgccggagacttcggtggctactactgcccctgccacggatcccactacgacgcttcaggccgcatccgcaagggacccgccccccttaacctcgaagtccccccacacagctttgtcgacgagggcctgctagtcgtaggttaa

SEQ ID NO: 23 - DNA, 3573 bp, Spodoptera frugiperda
  misc_feature (1)..(3573): Duox
atgacttcgtggatcgacggcagcttcgtgtacagtacgagtgaggcgtgggtgaatgcaatgaggtcatttcagaacgggagccttgcgagtgaaggagggatgcccctacgcaacacgaagcgagtgcctctattcaacaatcccgtaccgcattatatgaggatgctcagccctgaaagactatttctactgggcgatccacgcaccaatcagaacccagcgatggtgacgtttggtatcttactgcttcgctggcacaacgtggtggcagcccgcgtacaccgacagcatcctgagtggagtgacgaacaactgttccagcgtgcaagaagaattgttattgctagtttacagaacataatcctgaacgaatacgtgccagcatttttgggcgtccctctaccgccatacaaaggttaccgcgcggacgtggcgccaggagtaacacactcgttcgcagtggccgccttccgcttcggccatactcttgtaccacccgccatactactcagggacagaaactgtaaatatggacgagctcccggtggacacgacgccattagactgtgccagacttggtgggatggaaatgatgtaatgtcacaagtgccgattgaagaagttctattaggaatggcgtctcaagtatcagaaagagaggacgcactactctgttccgatgttcgtgacaatctgttcggaccgatggaattttccagaagagacctcggtgctcttaacattatgcgtggacgagataacggactcccagactataatactgcaagagaatattttggattgaagaagataaaaacttttaacgagatcaaccctcaactgtttgagaacaacccggatctactacagaaattgattcaagcttacaatggaagacttgataacattgatgtttatattggtggtatgttggaatctactggccatcctggcgaactgttcagagccatcataatagaccagtttacaaggatcagagacgctgacagattttggtttgaaaatgaacagaatggtatcttcactaaagaagagattgaggaactgcgtcagatcacaatgtgggatataatagtgaacagtacgtctcttggtccgcgagacttacaacgtgatgtgttccactggcgcgctggagacccgtgcccccaaccctaccaactcaatgcctctaaattgccaccctgcaagtaccttaggggatatgattactttgaaggcaacgagtttgcctacatctacacctgccttatactcgctttcgtccccatactctgcgctggcgcaggatatggagtggtcaaactgcaaaatagtcgcagaagaaagctcaaaattcaacaagaacatttgaaaaatgcacagtataaaggttcagtggacaaaatggtgtgtcgtgaatgggtgcatgcgtcgcacaaaaggctggtgaaattgcgtttgggaccagaacccgcactacacgtcactgataggaaaggagacaagctgagaacattaccactggatcacactgatcaactcacagttcttgaaagtcaggaaagcagaaccaacaagcgtcctctagtcttgatccgcgcaccacgggaacatgatctcgtgttagaaatggactccgcagcctcacggcgcaagtttctagtcaaactggacacatttttagcaaaccataagaaggcacttaacttgacccagggtcaccgtgaacaaattctagcaacagccgaaacaagagaacgaaggcaacgtaagctggaacatttctttagagaagcttacgccatcacatttggcttggctcccggtgagaagaggcatcgtaggaatgaagaggctgatcctgaatctattgtaatgagaacatcactatcaaagagtgaattcgcaagtgcacttggaatgaaagcagatgctgtgttcgtgaagaaaatgttcaacattgtcgacaaagacggagatggcaggatctctttccaggaatttctggacacggtagttctattttctcgaggagcaacagaagacaaactccgcattatcttcgacatgtgtgacgatgaccgtaacggtgtgattgacaagggagagctcagcgagatgttacgctctctcgttgagatcgcccggaccacgtcactgagagacgaacacgttactgaacttattgatggcatgttttcggatgccggtctccaacacaaagatcatctaacgtactcagacttcaaggtaatgatgaaagaatacaagggagagtttgtcgccatcggcttggactgcaagggagccaagcaaaacttcctcgatacatccacgaacgtcgcgaggatgaccagcttccatatcgaaccacctatggaacagtccaggcattgtcttctcctaaaatgggattacctaacaacattcctagaagagaacagacaaaacattttctacctattcgtcttctacgtggtaactatcggactgtttgtggaaagatttgcacattattcgtttatgtcggaacatctggacttgagacatataatgggcgttggtatcgccatcactagaggctctgctgcctctttatctttctgctacagtctgctactattgaccatgtcgaggaatctgttgactaaattaaaggaattcagcatacaacaatatattccactagactcaagtatacaattccacaaaatagtggcgtgtactgctctattcttctctctactacacacggcgggccatatggtgaacttctaccacgtatcaacgcagccagtagagaacttgcgatgtctcaccaaagaagtacacttcacgtctgatttcagacctggcattacgtactgggtattccaaactattactggtgtgagcggagtactgttattcgtaataatgtgcattatcttcgtatttgcgcacccggtgatccgcaagcgcgcatatccatggttctggcgcgcacactccttacacgtgctactttatgcgctctgtctcgtacacggcctcgccaggctcactggagctcctcggttctggatattcttcttgggacctgctattatttatacacttgataaggtggtttccctacgaactaagtatctagcactggatgtattggaaacagaaatgttaccatcggatgtgattaaaataaagttctacagaccaccaaatctaaaatatttatcaggtcaatgggtgcggttatcttgtacggcgttcaagaaggaagagttccactcgttcacattaacctcagctccacacgagaacttcttgtcttgtcacatcaaagcacaaggtccttggacgtggaaactcaggaattacttcgatccctgcaactttaatactgaagatcatcctaaaatcaggatccaaggtccattcggtggtggcaaccaagactggtacaagttcgaggtggcagtgatggtgggcggcggtatcggagtcacgccctacgcctcgatacttaacgacctcgtgtttggaacctccaccaaccgatactctggggtcgcctgtaaaaaggta

SEQ ID NO: 24 - DNA, 648 bp, Spodoptera frugiperda
  misc_feature (1)..(648): Domeless
tatcgagttgtatatgtgtactggaaacagctggaggagtatgaagaggctggtgcaaactttacatataaagttgtagctacaacaggctctaaaaacccacagactttgctgccagataagaacaaaagtttgagttatgttgaactaaatcgtgcaacgttagatgctatagatgttaccatttggtccactaatgcagtcggttcatctgtaaacagcagtcatctttacattccatctaaatatgacagtgaagttttaagtgtatcatcttttacaaaacttgcttatgaaaatggcacatacaaattatcttgggttggtgtcaaggaaattgataactatacacttttctggtgtcagcataatactagtcaaatttgtacaggacgtatgaatttcactgttttggatccaaagaagaacaaccacgttattgatttaccaagagacagtagatatcaatttgcaatatcagccaacagtgggtctaaaacaagtggtatgacatgggcatcctgtgatatctctaaagatggaataccaatgtatggcttccctgtgaaagtgaatcatgatgctccagggaaaacatttgtccaaatcacttggacaatgtcttgtaccttacaggaaggtattata

SEQ ID NO: 25 - DNA, 155 bp, Spodoptera frugiperda
  misc_feature (1)..(155): PPO
tggcgtacttccgcgaggacatcggcatcaacctgcaccactggcactggcacctcgtgtacccgttcgactccgcggaccggtccatcgtcaacaaggacaggcgtggagaactcttctattatatgcatcagcagatcatcgctaggtacaac

SEQ ID NO: 26 - DNA, 942 bp, Spodoptera frugiperda
  misc_feature (1)..(942): TAK1
atggcttccaatgtgcaagactcgcctgttcagcagacatttgtggaggagatagattacaatgaaattcaggagttatcggtggtgggcaagggggcgtttggcgtagtatggaaaggtttgtggagaaacacactagtagcagtaaaacacattaattctgaggctgagaagcgggaattttcaatagaagtacgacagttgtctcgtgtgtcacatccgaacatcgtgcggttgtatggagcgtgcacgaagggcgcccacgtctgtctagtcatggagtacgcggagggaggctccttatacaatgtgctgcacaaccgccccaaacctaaatacaccgcagctcatgcaatgagttgggctcgacaatgtgccgagggtgtagcatatctccatgcaatgaaaccaaagccattgatacacagagatttaaaaccgccaaacttgttactggtgggaggagggcaaaggctaaagatctgtgactttggaacggctgcagacaaagctacttacatgacaaataacaaaggaagtgctgcatggatggcacctgaggtgtttgaagggtcaacatatactgagaaatgtgatgtgttctcatggggtattatactatgggaggtactatcccggaggaaacctttcgaggaaggagggtcagcttttaggataatgtgggctgtgcatacaggtcagaggccaaacttgatagagggttgtcctgagccaatagagcagttaatgacacaatgttggcacaaagttccagcggagagacccagcatggctaaagtggtagacataatgtcagcgctgtgcgagttcttccccggcgcggatacgcccattaactacgacgactgcgaggacgaggactcggagtattccgaagacgagtacatgcaatacgacacgcaggacagcctcgacaccgac

SEQ ID NO: 27 - DNA, 289 bp, Spodoptera frugiperda
  misc_feature (1)..(289): Dred
agaaggactataagaggataatagtggagagttcagacagtgagaacagttctgtggaggaggtggaggacacgacggagggctacaccggcgaggacgacatgttcgtggatctcgtgcagactgagcggttgcagccacttatgtcagatagtgtagaagacgaggcgctgggttgtatcgagttcgcgcagcggttccgcgctcggtacgggcccaacacgccgcagttcttcgagggcaccttgcaggacgccatcaaggagtcctgtctcaaacctgccaaaga

SEQ ID NO: 28 - DNA, 438 bp, Spodoptera frugiperda
  misc_feature (1)..(438): FADD
aaacttccaaactctaacgatgtgctaaagaaaatagcagactatgaaaaagaacatgttcccagggaatatgtaaactattatgttgcgaaaccacaagatctcaagaaaaaagaatctgaagacagctatattagtaccagtccattatcaaatatgagtgaaagaaagaaacagagaatttttgacacaattactcaagaaattggtagtttctggcgtgatcttgccaggaatttgcaaatacgagaatgggtgattgacgaaattgattttcaaaaccaaactcttcatgtgaaggctacaaaactactgaaagaatatgattctaaagctgatccacaaagatggtttttcattctatgtgaagcattagaaaaaagccgtagaaaggatctagtgagatctattcagaatatcatggcaatgaatatttga

SEQ ID NO: 29 - DNA, 1389 bp, Spodoptera frugiperda
  misc_feature (1)..(1389): COPI beta coatomer
ccgttgcgcctggatatcaagaggaagttgacagcgaggtcggaccgcgtcaagtgcgtggaccagcacccgacggagccatggctcctgtgctccctatacaacggtgacgtgaacatatggaactatgaaacacattcgcagatcaagagattcgaggtatgcgacctaccggtgcgcgccgctaagttcgtgcctcgcaagaactgggtgattactggctccgatgacatgcagattcgcgtgttcaactacaacacgctcgagagagtgcacgcctttgaggcgcattctgactacgtcaggtgcatcgcgatacatcccacacagccatacatcctcaccagcagcgatgacctattgatcaagctgtggaactgggaacgcaactgggcatgccagcaagtgttcgagggccacacacattatgtgatgcagatcgtcatcaaccctaaagacaacaacacattcgctagtgctagtctcgacaccaccgtcaaagtatggcagcttggctcttcaatttccaacttcacattagaaggccacgagaaaggcgtaaactgcgtcgactactaccacggcggcgacaagccttacctcataagtggtgccgacgatcgtctcgtcaaaatatgggactaccagaataaaacatgtgtccagacattggagagtcacacgcagaatgtgacagccgtgtcgttccacccggagctgccgatcctgatgactggctcagaggacggcaccatcagaatatggcacgcgggcacttacagacttgaatcctcgctcaactatggcttcgagagagtctggaccatttcctccatgcacggctctaacaacgtagctattggttacgacgagggcacgatcatgatcaaggtgggccgcgaggagccggccatttccatggacgtcaatggaggcaagattatttgggcgaagcattctgagatgcagcaagtcaacctgaaggcgttgccagaaggcacagagataaaagatggggagcgggttccagtgatggcgaaggacatgggatcctgtgagatttatccacaaactatagcacacaacccgaacggtcggttcgtggtagtgtgcggggacggcgagtacattatttacacggccatggcacttaggaacaaggcgttcggcactgcacaggagttcgtctgggcgtttgatagctcagagtatgcgacacttgagaactccagcaccatcaaggtgttcaagaacttcaaagagagaaagagtttcaagcctgagtatggtgctgaaggaatatacggcggtttcatgttgggcgtgaagtccatcagcggtgtggcgttctccttctatgattgggagaacttggagttgatcagacgg

SEQ ID NO: 30 - DNA, 735 bp, Spodoptera frugiperda
  misc_feature (1)..(735): Cactus
aagagcaacttcaatactaagattgcggaggacgagaacgtcgactctggttttctatctggacctatagacgtgttacctggtgatgaggagtcggagcccgtgcccgagcctgctagtgaggataagaaagtgaaaagtgtaagtgccgtgcagcccagcgatagcgagtacgacagtggtattgtgtgcatatcggagctggtgtcgagcgtgcagctcactgacacacagaccccacacatcgccgtatcacctcctgagcagaagaacatcccaccaatcaccctattcttcacgccggacgaacagggagatacacaattacacatagcggcagtgcacggatgcgtaaaatcagtagcaacactcataagaatatgtccgaacaagatgtttttggacttggccaacgacgatggacacacagcgctacacctcgctgtgatgagtggaaatgccgtggtcaccaggatgctagtgcacgcgggactctcgatcgaagcgagagacaggctaggagaaacagccctacacaaagcatcgacaaaaggcaatgtagaatgtctacaagcgctacttgcgccggtgcctgaattcccatcaaggaagctaactacagtactgaatcaaaagaattataatggacaagcgtgcgtacacctagccacatcagcggggcatctcgtcgcgctacagaccctagtgttctatggagccgatattaaagcaaag

SEQ ID NO: 31 - DNA, 381 bp, Spodoptera frugiperda
  misc_feature (1)..(381): IKK-alpha
ctttctgagaaacacagagcgcgatggacgaaggaagtggaaatgttacagggatgccgcaatccaaatattgtgggtaccaaagatttgcctccagaattcgtcaaaggactcgagcgcgccaatccatcgggcctaccaattctttgtatggagtactgcagcggtggtgaccttcggcaggtgctcaacaaaccagaatcatgtgcaggcctcaaagaacaacaaattagacaaatactcagtgatctcagatgcgctatgcatttcctacatcagaacaaaattacacacagagatctcaagcctgaaaatattgtgatgcacatattagattcagtacagagtaatgtagctgtgcaaggccaaagaaaggtaatt

SEQ ID NO: 32 - DNA, 477 bp, Spodoptera frugiperda
  misc_feature (1)..(477): Tube
tctgtgcccaacatatacagtgttatagataatgctatattgacagacaaaaatctagttcagtttgattacagtgaattagaagctataactaacaacttttctgataactttgctgagacacctgttggacctgttgggaaaataggaagtggtggttttggagaggtttatgttggtagacacagaaaacatggtcttctagctataaagagagtgagaatgcatttccagataagctgtgaagttgccatgaaggtgtttaacactgaggtaaaggctctgtctcttctaagacatgaaaacattgttcccatctttggatactctatagatggtattacaccatgtattgtttgtgaatacattgatggtggctcactgtcatacaatattcaagaaagagtactgcaagtgaatgaaagaatgaatataataaaaggcacagcagaaggcctgaagtacatccatcacagt

SEQ ID NO: 33 - DNA, 288 bp, Spodoptera frugiperda
  misc_feature (1)..(288): Imd
aataatattcgcctgcttatggaagctacgatacggcctgaccatgactatatggattacatatcaaaaaaccttggcaaatcgtggaagaatttcttcaggaaacttggttacacagagggaagaattgatactgcccagctagatgctgtacaccgtggttacagcataagtgaggctcgatacaaactactatttgagtgggtgaacaacgaggatgatgcaacgctgggacaactggctactctattgtggcgtgaaggagagcgaagcattgtcaaagacctg

SEQ ID NO: 34 - DNA, 186 bp, Spodoptera frugiperda
  misc_feature (1)..(186): PBAN
atgttccgttctgttatcttctttgctgtttctgttagctgtgtcatcgctaactctaatgaaattaaggatggtggatcggatagaggagctcacagcgaccgagcaggcctctggtttggacccagacttggcaagcgttctttgaggatatctactgaagataacagacaagcattcttcaaa

SEQ ID NO: 35 - DNA, 720 bp, Spodoptera frugiperda
  misc_feature (1)..(720): beta-1,3-glucan recognition protein 2
tgcactggtcagttaggcacaacagaatgcaggcgacaagcgtctggggcccagatcctaccaccagtaactactggcaagatcaccactcgacacaggttcggtttcaagttcggaaggattgaagtcagagcgaagctaccagaaggcagctggcttatacctgaaatcaacttggaacctacagaacatgtgtacggatccctccgctatgaatcaggactgatgcgtatcgccttcgctcgaggaaacccaagtcttgccaagaagctgtgcggcggccccatcctatctgactcagatcccttcagatccttactgatgaaggaaaagattggaatcgacaactggaataaggacttccataactacaccttgatttggagacctaatggtcttcaactctttgtggatggtgagcagtatggaactatcgaccctggcgatggtttctttaacaccgctcggcagcacgcagtccctcatgcttctaattggttgagaggaactgtcatggcgcctcttgacgaaacgttctacatatctcttggtcttcgcgcgggaggtgttcatgattttgctgatgatatccctgacaaaccctggaggaaccgaggcagtaaagccatgctggacttctggaaacacaaggcatcttggcacccttcctggtacaatgctaacctgaaagtggactatatcaaagtttttgcgttgtag

SEQ ID NO: 36 - DNA, 552 bp, Plutella xylostella
  misc_feature (1)..(552): Dred
gcgcgctacggacccaacacgccctcattcttcgagggaaccctggcggacgccatcaaagaagcctgcttgaaacccgctaaagatcggaagctcctcggcgtgtacctccaccacgagcagtccgtgctgtcccacgtgttctgcgcgcagctgctcggctgcgagaccgtgctgcacacgctggcgcacaacttcgtgctgtacggctgggacctcacgcacgcgagcaacaaccagatgctcctaacctcaatagcgaacgcgctcggcccgatggcgtccatgacggtgcgcagcatccccgtggagcgtctcccggccttactggtcatcatgcgcgtgcgcagcaacacggagatctactccgtcatcaacggcaacgtcggagtctccgagctagtaggccagctagtggaagccatcgagcggttcgcggcggctcgagaccaggacgcgaaggctgaacacgagcgagaggcgaggcagcgggtgaagagagagcaggatgaagcgtaccagcaaagccttgaggctgacagagctaaagag

SEQ ID NO: 37 - DNA, 930 bp, Plutella xylostella
  misc_feature (1)..(930): TAK1
cagacattcgtggaagagatagattacaatgaaattcgggagttgacggtagttgggaagggtgcttttggagtggtatggaagggtctttggaggaacaaatatgtggctgtgaagcatataaactctgaggctgagaagcgagagttcgcaatagaagtgagacagttgtcccgagtgtcccacccaaacatagtgcggttgtatggagcatgcacgaagggagctcatgtgtgccttgttatggagtttgcagaaggaggatcactgtacaatgtgctgcattgtcaccccaagcctaagtatactcctgcacatgctatgagttgggctctacaatgtgccgagggtgtagcatacctacatgcaatgaaaccaaagccgctaatacacagagatttaaaaccaccaaacttgcttcttgtgagcaatggacagagactgaagatttgtgattttggcacagcggcggacaaggctacatacatgacaaataacaaaggcagtgcagcatggatggcaccagaggtattcgaagggtcgtcctacacagagaagtgtgatgtcttctcctggggcatcatactgtgggaggtgctgactcgtcggaaacccttcgaagagggtggctccgcttttggcatcatgtgggcagtgcataatgggcagcggccgccgctgatcgagggctgcccgccgccgctggagcagctcatgacgcagtgctggcacaaggtgcccgcccggagacccagcatgaacaaggtagtagaaataatgacagccctcagcgaattcttccccaaagcggacactccactgaactacaacgactgcgaagaagacgacagtctcagtctggacgacgaatacatgacgtatgacactcgagacagccttgacactgacgccacggacatgtcacagaac

SEQ ID NO: 38 - DNA, 1186 bp, Plutella xylostella
  misc_feature (1)..(1186): PPO
gcaggacctcaacagggctgcggataacttgcacgtgtctattagtgacatggagcggtggaggagaaatgtggaggaggccatcgctactggacaagtgcgcttgcccaacggccagcagcagccgctagacatcgacacgctgggcaacatgatggagtcgtcgccgctgctgtcgcccaaccccgagctgtacggcgccatccacaacaacggacactccttctccgcgtacatgcatgaccctacgcatcggtacttggaatcattcggcgtgatcgcggacgaggcgaccacgatgcgcgacccgttcttctaccgctggcacgcgtgggtcgacgacaccttccagaagcacaaggagtccgcctacgtgcgcccctacacgcgatccgagctggaaaacccaggcgtgatggtgcaatccgcccgcatcgagacaaccgggtccaaccaggccaacacgctgaacacgttctggatgcagagcgacgtggacctgtccaaggggctggacttctccaaccgcgggcccgtgtacgcgcgctttacccacctcaaccaccgccccttcagatatgtcatcaacgtgaacaacgcgggcagcgcgcggcgcgccacggtgcgcgtgttcctcgcgcccaaggtggacgagcgcaacctgccgtggtcgctcaacgaccagcgcaagatgttcgtcgagatggaccgcttcgtcgtgccactgaatggcggcgccaacacaatcacccgtcaatccacggagtcctccgtcaccatccccttcgagcagaccttccgcgacctgagcgcgcagggcaacgacccgcggcagcaggggctcgccgccttcaacttctgcggctgtggctggccgcagcacatgctggtgcccaaggggaccgaggccggcgcgcagtaccagctgtttgttatgctgtcgaactatgagctggatcaggtcgagcaacccgacggccgccagatctcgtgcaaggaagcatctagcttctgcgggctccgagaccgattatacccggaccgacgccccatgggcttccccttcgaccgcccctctcgctctgtcaccaacatcgaggacttcgtgctgcccaacatggcgctggttgacgtcacgatccgcctgcagaatgtcactgagcgcaaccctaggaatgttcaacag

SEQ ID NO: 39 - DNA, 2595 bp, Plutella xylostella
  misc_feature (1)..(2595): Domeless
  misc_feature (2476)..(2486): n is a, c, g, or t
acgttcccgcccggagacatcaacatcccgtacggctcgccgctggacatctactgcaccaccgacgactacaacgccaccgacctcaggtttgagatcaacggaaagaccatagagagcactatcgttaaccaaactaccatccggcactaccagaggcatccagatattgacatcaaaacatactactgtgtaaatactgccacaaggaagaaatgcataaacagagtcctcatagacacaccaccaaagaatgttactgattttaaatgtatctccaatgatcttaatactttgaactgtacatggacatctcagaaagctctaagcaacataaaatacaatctgagttttggttacaacagccagctagattgtaaagtggacagaataatggacactcgttattgcttcttgagtacaactactaaacctaggtacaggcagaccctggcagtctataacttcaacctgacatcttgcagtgtcttcggctgcaatcaacagtttataaacatagatcactattctattgtcaaaccaaaacagctaccagtcaaagctaatgtgaccggacctcacagtgtcctcttaacatggagcctgtctaacaatctagtcgagtatctcagatgcggagtggaccataaaattcaataccaaattgctaaaatagataatccacaacaattcagacaaatcaatgccacttggctgcctcagcttaataaaacttataaatatgaattggccttgccctatgcatttatgaattatgaggtgcgagtttatgtgaaatcaaaacatgccagtgatgatatgtggtcagatttcagttttgttgtcttcaaaactgacagtgaaaggccacataggcctccagacatgcccgcaggagcatttcaaataaaaccatttacaaacagtattcgccatgaagtgtacatcatctattggaaacagttggaagagtatgaagaatgtggagaccattttacatatgaagtaacggttatccatcagaataagacacaggtgttgaatccacaactaaatacaagtttgagttatgttgaactgcctagaacaactacacaagctattgatgtttatgttcgatctaaaaactctgaaggcttatctgtaaatagtagccacctctacataccatctcaagcacaaattctagaaggatctacttcattcactaaactggcttatgcaaatggcacatatgagctttcctgggatatcaatataaaggacctctacaagattgataactatacattattctggtgccgacacaactggactcaagtttgccaggggaggatgaactactctattctagaaccacacaagaagaaccatattattgacctgcgaagtgatctaagataccagtttgccatatctgtgaacagtggtgcaaagagcactggaatggtgtgggctaaatgtgacatatccagagacgcagccaattatgatatacctgtaagactaaaacatgagaagcctgtaaattcatcagtagaaattaaatgggaaatggaatgtactctaagggatggcattatcattggctatagaattaactattgtgcaatatttaaaacaaaagatgaatgtgataacactgtaggaaacaagactattgatatatttaactcaacagcaagatctgtgaatataactgatttactatatcacaagacttacaaatttggctttgttcttgtgactgccaatggcccaatacggataaaatatgcaacaacatttgtaactactcctgaaggtgtaccctcaagtcctgtcaacatcactgtatcaaacattactcatgactcagtagtgatttcctatgatcctccagtaatgaagaatggttatattgtgaaatatgcaatttacaactatggagagatattttacaatgacaccatgagtataccaaatgaatcagagagctctagaagaagatatgtaaaattggataaattaaatggatacacaaattattcctggactgtactggcatgtaattcatattgttcattaaatacttcagagcctattgtaatgaggacaagcataggtcctcctgggaaagtaggagaggtttacacctcacataactcagacacactggaatggactccactaagcgaaaaagacgtagcaggtcatccagaaaccatgatataccaggtgcaaaaagtgaaaaatgacgtcccacaaatttacgagacgccagccaatacattctcgattgctggtccttgcgaaggcatcataaaatatcgcgtcagagcagtcaactttgatgacgacccgactcacggggcttggtcggatagtgacaatgtagtcttgcctactcgcaatgaaaatgagactatcgagaagatcgcatacgcagggaaatggagcagcaactataccatggattgcaggacatcgccgacannnnnnnnnnnaacaatcttgccattcttgttcctctttatatttttgatcggcatgacctttggatttattaaactgtacaaaaaacaccgctcaatgaaagatattaaacccagactt

SEQ ID NO: 40 - DNA, 1395 bp, Plutella xylostella
  misc_feature (1)..(1395): Duox
tcagtagacaagctgatctgccgcgagtgggtgcacgcgtcgcacaagcggctggtgaagctgcggctgggccccgaggccgcgctgcacgtcacggaccgcaagggggacaagctgcgcaccgtgccgctgcaccacaccgaccagctcaccgtcatcgagaaccaggagcaccgcggagacaagcgtccgctgatgctggtgcgggtgccgcgcgagcacgacctggtgctggagatggactcggtggccaccaggaggaagttcctgctcaagctcgacaccttcctcggacaacacaagaaggcgctgaatctcacacagggtcatcgtgaacaaatactggctacagctgaaacaagagaaaggaggcagagaaagttggaacactttttcagagaggcgtacgctatcacctttggattagcccctggcgaaaaacgcagaagaaatgaagattcagacccagagtcaatcgttatgaggacgtcattatcgaagtgtgaatttgccagtgcattgggaatgaaatcggacgccgtatttgtgaagaaaatgttcaatattgtagacaaggatcaagatggaagaatttcattccaggaattcctcgacacagtggtgctattctcccgcggagcaaccgaagacaagctacgcataatattcgacatgtgcgacaacgaccgcaacggcgtcatcgacaagggcgagctcagcgagatgctgcgatcgctcgtcgagatcgcgaggaccacctctctgagggacgaacacgtcactgagctcattgatggcatgttctcggatgccggtcttcagcacaaagaccatttaacgtacacagacttcaaagtgatgatgaaggaatacaaaggggaatttgtggccatcgggttagactgcaagggagcgaaacaaaacttcttggacacctccaccaatgtagccaggatgaccagcttccacattgagccttccatggagaatagaagaaactggtgcctcttaaaatgggattaccttacaacattcctagaagagaaccgtcaaaacatcttctacctgttcatattctacgtcgtcaccatcggtctgtttgtggagaggttcgctcactactccttcatgtcggaacacttggacctgcgacacatcatgggcgtcgggatcgccatcaccaggggctcggccgcccctctgtccttctgctacagtctactcctgctcactatgtccaggaatttacttactaagcttaaggaattcagcatccaacagtacatcccgctggactccagcatccagttccacaagatcgtggcgtgcaccgctctgttcttctccctcctccacaccatcggccacatggtcaacttctaccacgtgtccacg

SEQ ID NO: 41 - DNA, 585 bp, Plutella xylostella
  misc_feature (1)..(585): Rieske
caccgcgacattccgcacccaaacttcaacaactacaggaagaaccagttcaaggacgtcaacaggagcgaattcgggcaaggagacgagaagaaaggctcttcgtacgcgctcacgtgcttcggcctgatgggtgctctgtacggaacgaaggcactggtgatccactacgtgaccttcatgggcgcggcggccgacgtgctggcgctcgctactgtcgagatcgacatctccaagatcgcggccggcggctgcctgtcctacaagtggcgcggcaagcccgtgttcatcaagaaccggctgccgtccgagatagaaatagaagcgagcacgccaatgagcgcgctgaaggacccggtgcctcctgaggccatgctgaagcggcccgagtggctggtggtcatcggcatctgcacgcacctcggctgtgtccctatccccaacagtggggacttccccggcggcttctacttccccccccccggcccccccagccactacgacaacgtcggccgcgtcaggaagggacctgcacctattaatctggaagtgccgagttacgagtttctatcagacactctactt

SEQ ID NO: 42 - DNA, 180 bp, Plutella xylostella
  misc_feature (1)..(180): Voltage-gated potassium channel
gacgaggaggacgagccgcggtgcgtcacgctcacgccgcgccacaaggccgccatccgcttcatacggaagatgaaatattttgtggctcgccgtaagtttaaggaagcactaaagccatacgacgtcaaggacgtaatcgaacagtactcggcggggcacgtggacctgctgggccgc

SEQ ID NO: 43 - DNA, 1466 bp, Plutella xylostella
  misc_feature (1)..(1466): Rop (Ras opposite)
atggcgctcaaagcacttgtcggacaaaagattatgaatgaggtgatccgctaccgcggacccaaggggaaggagtcccagcgcatagaatggcggatcctgatagtggaccagctgtccatgcgcatggtgtccgcctgctgcaagatgcacgacatctctgcagaggggatcaccttggtagaagacatccacaagaaaagggagcctctctgtactatggatgggatctacttgatcaccccgtgtgagaagtcggtgcatgcactcatcaatgacttctctgttggaaaccgcattatgtacaaggcagcccatgtgtttttcactgaagtatgccctgaggaactctttaatgagatatgcaagtcatcagcggcccggaagattaaaaccttgaaggaaatcaacatagccttcttgccttacgagtgccaggtgttctcgctggactcgccggacacgttccagtgcatgtacaacccggcgctgacgcagacgcgcaacgccaacatggagcgcatcgccgagcagatcgccacgctgtgcgccacgctcggcgagtacccctccgtgcggtaccgcagcgactgggagcgcaacgtggaactggctcagctgatccagcagaagctggacgcgtacaaggcggacgagccgaccatgggcgagggcccggagaaggcgcgctcgcagctgctggtgctggaccgcggcttcgactgcgtgtcgccgctgctgcacgagctcacgctgcaggccatggcctacgatctgctgccgattgagaatgacgtgtacagatacgacgcgtcgcaaggcggccccatgaaggaggtgttgctagacgagaacgacgagctgtgggtggagctgcggcaccagcacatcgccgtcgtgtccacctccgtcaccaagaacctcaagaagttcagcgactccaagcgcatgggcggaggtgacaagcagtcgatgcgcgacctctcgcagatgataaagaagatgccgcagtaccagaaggagctgtcgaagtacgcgacgcacctgcgcctggccgaggactgcatgaaggcctaccagggctacgtcgacaagctgtgcaaggtggaacaggacctcgccatgggcaccgacgctgagggcgagaagatcaaggatcacatgaggagcattgtgcctgtgctgctcgaccaggcagtgaccaactacaacaagatgcgcatcatcgcgctgtacataatgtccaagaacggcatctcagaggagaacctcaacaagctggtgacgcacgcgcagctcgagccctccgacaagcagacgctgctcaacctcgccaacctggggctcaacgtcgtcattgatggcaatcgcaagaagcagtaccaagtgccgaggaaggagagaatcactgaacaaacctaccagatgtctcgatggactcctgtagtcaaggatatcatggaaga

SEQ ID NO: 44 - DNA, 1716 bp, Plutella xylostella
  misc_feature (1)..(1716): RpII 140
aaaccctctcttgatgaagcttttgtgattcaagaacagaatgtagccctgaacttcattggagctcgtggagcccggcctggtgttaccaaggagaagcgtatgaagtatgcccgggaaattttgcaaaaggaaatgctgcctcatgttggagtttctgacttctgtgaaaccaagaaggcatacttcttaggatacatggtccatagattactattggctgcattgggacgcagggaacttgatgacagagatcattatggaaacaagagattggacttggctggacctcttttggcattcttgttcagagggttgtttaaaaacttgttaaaagaagtaagaatgtatgcccagaagttcattgacagaggaaaagactttaatttggaacttgcaatcaaaacaaagatcattactgatggtctcagatattcacttgctacaggcaattggggtgatcaaaagaaagctcaccaagccagggctggagtatcccaggtgttgaatagattgacatttgcttcaaccctatcacatttacgtcgtgtgaactcacccattggtcgagatggaaagctagccaaacctaggcagttacacaatactctgtggggaatgatttgtccagctgaaacacctgaaggtgctgctgtcggcttggtaaagaatttggccttgatggcttacatctctgttggaagtcagccatctccaattctggagttcttggaggaatggtccatggagaacttggaagaaatagcaccatcagctattgcagatgcaaccaagatctttgtgaatggttgctgggtcggtattcacagagaccctgaacagttgatggctacattgagaaaactgagacgtcaaatggacattgttgtgtcagaagtaagcatgattcgtgacataagagatagagaaataagaatctacacagatgctggccgaatctgtcgcccattactgattgttgaaaatggcgctcttttactcaaaaagaagcatattgataatctcaaggagagagactacaacaactatggatggcagaatttggttggaagtggtgtggtggaatacattgacactttggaagaagaaacagtcatgatagctatgagccctgatgatcttgctcaagtgaaagaatatgcctactgtaccacttacactcactgtgagattcatccagctatgatattgggtgtttgtgcatccattattccattccctgatcacaaccagagccccagaaatacctaccaaagtgctatgggtaagcaagctatgggtgtctacattaccaacttccatgtacggatggacactcttgctcatgtcctgtattcccctcacaagccacttgtgaccaccagatccatggagtacttgagattccgagagttgccagctggtatcaactctattgtcgccattctctgctacactgggtataaccaggaggacagtgtcatcttgaatgcatcagcagtggaaaggggtttctttagatctgtgttctatcgatcctacaaagactctgaatccaagagaataggagaccaagaagaacaatttgaaaaacccactaggcagacttgtcaaggaatgagaaatgctttgtatgacaagctagatgaggatggcatcattgccccaggtatcagagtgtcaggtgacgatgtcgtcattggcaaaactattaca

SEQ ID NO: 45 - DNA, 450 bp, Plutella xylostella
  misc_feature (1)..(450): Proteasome beta
acaggctgcttcgccgacgccacttcactcgtaaaattcgtcaaaaccaacatgttaatatacgaacaagaccaccacaagcccatgtcgatagcagcactcgcgcaaatgctgcaagtcatgctgtattttaaaagattcttcccgtactacgtgtccacggtgttggtgggcctcgacggtgagggagagggatgggtgtataactacgacccagtcggcagctatgagaggtgcaagtgctacgcggccggctccggagccagccagccgctgctcgacaaccaggtcctgaagaccaacatgaagggagctctagaggagccgatgcccatgaagactgctatctcactcatcaaagacgtgttcaccagcgcggccgagaggcaaatacacgtcggtgactgcgtcaaaattatgatcatcacaaagcatggagtcactcaagaa

SEQ ID NO: 46 - DNA, 948 bp, Plutella xylostella
  misc_feature (1)..(948): beta-1,3-glucan recognition protein 2
gtttgcaagggcgctctggtattcaatgaagagtttgacaagtccaatgtcaaagatttggacaactggagcccggaagtcaagtttcctgaggagcctgactatcccttcaacctgtacaccacgaccaagaccctgacactcgaggacggagacctcaacatcaaccctctactactggagaaccagtaccacgaaggaatggtctatgaggagctggacttgaccaacacgtgcaccggacaagtaggcaccaccgagtgccagcgcaaagccatcggggcaaacatactgcctcccgtcatgaccggcaaagtaacaactaaacataaattcaacttcaaatacggaagagttgaagttcgagcgaaattaccagctggaaattggctacttccagaaataaacctggaacctagagactacatctacggggtcaaccggtacgcctcagggctcatgcgggtcgccttcgtccgagggaaccctagtttctccaagaagctcagtgccgggccggtgctgtctgatgcggaacccttcaggtcggccctcttgaaggagaagatcggcatcgacaactggaataagggctaccacaactacacgctgatttggaagcctgacggcgtctccatgcaagtagacggtctgcccttcggcaccgtgtctccaggcgaggggttctaccacgcggggcgcgagcacgccgtgccacacgcctcgctgtggcacaaggggtcggtgatggcacccttggatgaactgttttacatcagcctcggagtccgagtgggtggcgtccacgatttcccggacagcaaggacaagccctggaagaaccggggcaacaaggccgtgttcaacttctgggaggccaaagatgcctggttttccacctggtatgacagcagcatgaaagtagactacgtcagagtctacgctctg

SEQ ID NO: 47 - DNA, 420 bp, Plutella xylostella
  misc_feature (1)..(420): PBAN
gaccgcgcgtccatgtggttcgggccgcgcctcgggaagagagccatgcacctcgcgccggacgctgacggacaagcagtatacaggatgctcgaagcagcagacgcgctcaagtactactacgaccagctccagtattatggggctcaggctgatgatcctgagactaaagtgacaaagaaggtgatcttcacccccaaactgggccgcaacgctgatgaagaccagcagcagtcggtggacttcacgccgcgactcgggcgtcggaggctcaaggactcggggctggcgccgcctgatgaataccgcaccccggagctgctggacgcgcgcgctcagtacttctccccccggctcggccgcggcggcagcatgaccttctcgcctagactcggacggaaccttgtttacgatttatac

SEQ ID NO: 48 - DNA, 681 bp, Plutella xylostella
  misc_feature (1)..(681): Imd
gaaactattgcaaaaagtttcaagtctgatgcagtcccgaagccacctagagaaccggtagagactacagatacatcacaaaataataccgaaaatcagccttacaatgtcgaagaagaggaaatacccgaaccagaaaagcctaagaaagaaaaaaagaatcccaagcctaccaaaaaaaatttctttaatcgtgacaaaactaacaaacacgacgatacccgcaaacatacaaaatccggaaaggaccagacatcaattaatactcaagcaactggtgatgtaatccatgtggtaaattccaaagatgtgcaggtcggccatcagtatgtgtacaacatgggaactcccggagctaactcacaaaagaataacccatttgatgatgaagaaacagtagaaaagacaaatctaataactctggtcatggaagcaaaaattatgctggaacatgaatacatggactatgtctcgaagaacctcggcaggaactggcacagcttcttcagaacgctcggcttcacgcgggggcgcatcgagactgtggaactggatgagggcagaaatggtgttgcagaggtgcgctacaagttgctcctggagtgggcccgcaccgacgaggaccccacgctggggcggctcgccacgcgcctgtgggacgagggcgagcgccagaccgtc

SEQ ID NO: 49 - DNA, 1860 bp, Plutella xylostella
  misc_feature (1)..(1860): Tube
aagaatatagaaatacgtaaattgcccgttggatcactttacaacatcgcagatattttagaaaccaatcaggattggaaaaaagtaatggctatcataccaaaaaatcctcaaagtagtgattttgaacctaaatacaataatgaacacataagattaatcgaggaccattcccgatctactgggaggaaatgtgctgaaattctaatagaagaatggagtacttcaggcaggatcagaccaacactcagcaccttgaaagatattgttctgaaggctgaaatttatcgagccgctgatgccctagctgcacttttacaagaaaatgaaccatcaagacctcagcatggtccagcagcccagatagacattgacatatcaaaaatgctggaaagtgactctttaaaaaatttcaacaccaccaactcagtaaagagggaatactttgagaagacgacacaacagctacagaggcctaccgatgagcttgagaaaatgattggagaacaacccacactgcagatgaagtccgctagcaacatgatcgagttttctgcagacatgaactcagcagacattcctaacataagtgcacttcaacctttgtcaaataagtccactatgcctctgaaatctgacagtgacctgatcaagttctcaactaaatacccaataccagaggttaatgtggaagagccaactttagaatctgtaaatattccacacttcagtgcaatgatgtctgcatctgagattgatagtaagacccacattgagtctacacaacccagttatgagtcaacaggctcacagttcacaggtcctggcagcgaaccaccactgggctccatgcagtcagtcagtacataccaaatgtctttacccaacatagattttgaagaaaacaattcatccagtggcattgacagtctcattttacaggattccaatcttatccactttgagtaccaagaactatatgagataactggtaaattctcagagaaacttatcaaaggtccatatgggccaagtgggcgcatcggcagtgggggatttggagaagtgtttgtaggattccacccaaaacatgggcctctagctatcaagaaggcccatagccatttaccatttgacaaaagtttagcaatgaagtttttcaatgcagaagtgaaatatttgtctcaatttaaacacacaaatattgtgcctatacttggtctgtccaaaaatggacctgatatgtgtattgtctgtgaatttgtggaaggaggatctttggaagaaaaacttgctgctaaggtattgactgaaagtcaaaggataaagatcatggttggaactgcagaaggcttgaagtacctgcatgggagcggcaacacagaccatgacctgggtcaaacagagtcacagaactcaaaaaagaacaattttcttcatggtgatgttaaaagtgccaacattttgttaactcgagattgtgtaccaaaactctgtgattttggattagccaaacaatttgactctacatttataatgacgtcaccaatgggaacttctgcatacatggcgcctgaaggattttcaggtactatcactcagaaaatagacatttacagttatggcatagttctactggagttactaacaggatttaaggctattattgtaaatagtagtgaaaccataaatatccaactttatattgaagaaaactgtgttgacaatgatataacaccacttttggatccagtagtcgagaattggacgaaagcaaatgaaatttacaacttatccttaaagtgtttggaaaggcagagaaaaagtagaccatctatagatgaagtttgtgatattttg

SEQ ID NO: 50 - DNA, 1113 bp, Plutella xylostella
  misc_feature (1)..(1113): IKK-?
ggtgactgggtgaaagaccgagtgctgggctctggcagctttggaatagtgatactatggaagcataaaagaaccgatgaaaaactcgcgattaaaacatgcaaatggggcaatgaactcactgataaacacaaagaaagatggaccaaagaggtggaaatgttacaaacctgtgacaacccaaacatagtgggaactagagaactacccccggagtttaaaacaggattagcgcgcgccaacccctcggggctgccgatattatgcatggagtactgcagcggcggcgacctgcgccagctcctcaacaaaccagagtcatgtgccggactcaaggaactgcaaatcagacagatactcagcgacatcaaatcagccatgcagttcctataccaaaacaagatcacacaccgcgacttgaagcctgaaaacattgttatgcaaaatatagacaatgttggaagaagtgaaataggctcacaaagccaaagcaaggtactcttcaaacttattgatctcggctatgcgaaggagattgactccaactccgtctgtgccagttttgttgggactctccaatatttggctccagaactattctacagcaagacttacagtaattcagttgatttctggtcatttggtctagtggcctttgaaattctttgtggagtgaggccgttccttccaaacatgccccctgtgcagtggatgccacatatcaaaaagaaggcacatgagaatatttgtgtctatgaaacacaccacggtgacattgagtattcagatgaaatattccctgaaaattatatttcaaagccatttaaggcactgctggagaaatggttcagggtggcattagaatgggatcctaagttacggggaagagatgctccgtctaaagttaccttcaacctgcctacagaggagaagggagaggcaagcaaagtgatattgttcagcatgttagaaagtattctggccaagaagattattaaaatattttgtgtctacaacctttcattcattgcatatgaaattgatgacaacacttcaatagcaacattaaaaacttggatatggaaagacactcagataaaagtatcagagcag

SEQ ID NO: 51 - DNA, 669 bp, Plutella xylostella
  misc_feature (1)..(669): FADD
atgactttaactgattactgtgaattaaagcaaaaaattgtgatcggtgttggtgaaagcgataagcatggacaactcgtaaacatgttaaagaatttattcaaagatgaaattaactctccaaggcgatttgaacaaatcaagacaatcggccaacttattgaaattctagagataagggatatcgtttcagaggacaacgttactatattgaagcacatagctgagagattgactaatagcgagcaacttttggacagaatcaaacattacgaaacaacacatattccaaaaactaacctaaattattatgctcaaccaagcattcctgaaccagtttctaacgaaacaagctttttgagcacaaaccctctaccaaccactatgagtgccagaaaaaaggaacggatatatgcaagaataacagaaggaattggatccaattggaaagacctggcacgaaatttgggtatccgagaatgtagaattgatgaactaaatatagaatacccaactgttatatctaaagctaccaaagttttagaagagtatgagacaactagagctgatcctcaaagatggtttttagtgttgtgtacagcacttgagaagtcacgcagaagagatttgagcagaatgattcgagagattgaaactatgaacctataa

SEQ ID NO: 52 - DNA, 549 bp, Plutella xylostella
  misc_feature (1)..(549): ATF-2
ccgcaaagtatacaaaagacatgctcggagctcatcaaggccggcctgaagctgtccatcgagtcgaagcgcaagatgtcgggcagcgacacggacagcggcggcgtgaagcggctcaagaggccgctggaaggagccggagcgctcggctgatgaccgcgggagctcgcgctgggcgtccgacgacgtgcggagcggcggcggcggcggcgggagaggaacaagatcgccgccaccaagtgtcgcatgaagaagcgagagcggaccgtcaacctggtcactgagagcgaggtgctcgagaaccagaacatagacttgaagtcacaactcaaggacttggaagtgcaaagacggaaactcatcgacatgctctccctccacaccgcgtcctgcgtcaagaacaactccaacaactccaaccagcagcagtacaacatgatccggccctacgaatctccaacccccttccccgcttgctacgagacttcctccccctacatccgaccagagtccgcgaacatcctggcctctagctacacctgcgtcacc

SEQ ID NO: 53 - DNA, 507 bp, Plutella xylostella
  misc_feature (1)..(507): Cactus
atgagtttcaagaaggatttcgacacctcaaagaagatccaggaggatgaaaacacagactctgggttcctatctgggccgataagtgagcagctgacctcggaagattgtgatttagcggaggaaagtgagcgtgctcgcagcaggcttagtgaggaagatcctgagcctgagctgcagttggacagtgggctggacctctcggagtgtctgtcgagtgttaagcttagtgatagtgcagtgtacacacccacctcgcagaccacccccacagtcactataggtgatgagaaaactcatgacatcccgcccctcgccatcctgttccagcaggatgacgatggagacacacaactacacattgcagcggtacatgggtgcgaaaaatcagtaggaacattagtaagagtttgccctgacaaagattggctaaatgtaccaaatgactttggacagaccgccttacacttagcagccatgagtgggcatgcagtagtcacacgcatg

SEQ ID NO: 54 - DNA, 674 bp, Plutella xylostella
  misc_feature (1)..(674): p38
atgccgaggtatcacaaagtggaaattaacaaaacagaatggatcgtgccagaaagatatcaagcgcttactcctgtaggttctggcgcctatgggcaagtttgctcatctgttgacaccctgcataatatgaaagtggctatcaagaagttggcccggccgtttcaatcagctgttcacgctaagaggacctaccgtgaactccgcatgttgaagcacatgaaccatgagaatataataggtttactagatgtgtttactcctgagaagtgtctggaagacttccagcaggtgtacctggtgactcacctcatgggggctgatctgaacaacattgtccgcacgcagaagctctccgacgaccatgtgcagttcctggtctatcagatactgcggggcctcaagtacatacactcagcggggattattcatagggatttgaaaccatcaaatatagctgtgaatgaagattgtgaactaaaaatcctcgactttggtttagcgcgaccaactgaaaacgaaatgacaggatatgttgcgacaaggtggtacagagcaccggagatcatgctgaactggatgcactacaaccagacagtggacatctggtcggttggctgcatcatggctgagctcctcactggcaggactctgttccccggcacagaccatat

SEQ ID NO: 55 - DNA, 694 bp, Plutella xylostella
  misc_feature (1)..(694): COPI beta coatomer
gctcacgaggatatgcttccagaatgcgcacgattatggggggctgctggtgttcgctactagcacaggtgacaaagagctgatgaaggagatagcagacatggccctgaaggagggtcagaacaacgtggcattcctcgcgtacttcacactgaacgagctggagacctgtctgaagctgctcatagacaccgacagactcgccgaagccgcattctttgccagatcgtacatgccatcgaaggtggtggaagtggtgaagctgtggcggcaggaggtgaccgccaccaccaacaagaagtcgggccaggcgctcgccgaccccgagagctatgagaacctcttccctgaattcgccgaaagtctagaactagagaagtaccaggcagaattcggctacgagtacagttccaacctcgcaaacattccagacaattacaaactcagcaatattgacagagatttggctttagagaaagccgaagcagagaaactcggcctataccaccccagcgcttcagtccaaagcaccgagcccaaagagccctctccggaggtgtcgtcagccacggaggccaagctgaagcgcaagaactccctggacatgatggaggagctagagaaggagctggatgatgtgcaactggaggacagcgtggaaagcctggatttgtcggatgaagcagatttgatc

SEQ ID NO: 56 - DNA, 478 bp, Plutella xylostella
  misc_feature (1)..(478): Hopscotch
gaatacgacgtgtactatctagatgtatgcaaagacaataaaccaaatacctataggatagactactcagacggccaattcacgttgatggataagagttatgcgaacatacgacaattgctcgacgactaccgaagtaaagacggcaagatttacctggactactgtatacccccttcagagtatgacgtgtcgcagttgctactgtgtcgtgagaaacaaaagaaaggcgagcacattgaccccaaccagctaccagagatcctcagaaacaatcagagttccctgtgtctgaaaccaaacgacatcttcctatatccagattatgttaaaataggcaaaggcggcataacagttacatctaagggcatttggaagttagacgagcagaaaaaattggacattgccttcaaaactctgcacaaagacaaaatcatgtatttaacggaattcatggacttagccagcaagtggatgt

SEQ ID NO: 57 - DNA, 1665 bp, Spodoptera frugiperda
  misc_feature (1)..(1665): dorsal
aacttcgatcacaaaaaccatccccaaagcatcgacctgaacgcggtgcgactatgtttccaagtgttcttgccggacgagacggggcgactacggcgccccctgacgcccgtcgtctccgacgtcatctacgacaagaaggccatgagcgacctgctcatcatgcggtccagccattgttctggcccggctaaaggcgggactcaagttatcttactctgtgagaaggtgacccgagaggacatcgaggtagtcttctatcaggaggaagacggcataatagtctgggaagagacagctattaggatcctggtgcacaaacaagttgctattgctttcgagacgccagcgtacaggatcccgaataccactgaccatgttaacgtgtacttccagctgaagaggctgtcggacaacgcccgcagcaactcgctgccgttcgagtactaccccgacttctcaggtagcgcgcgcaaacctctcccagacctgtctctgttctcgctgctcctcaacgagaagcgaacagacaccaataacaacaaacaagacaaaaccgaagtcgttagctccactactgatagttacagcgcctccgacgacactgataccgcgcaggtcaccgacaccgacgtcaatggtaacccgcaggttgccgacgtcgagatcatcgacaccaacgagaagagtctcaacgaacttctcgatcaggtcgcggagttagacgagatatactcggagaaccgcacgcgcctcgaaaacatatcctcattgactaacgacagtgaagatatagaggatttcaatgacgcgggcacttacaccagtctgcaactcgctttcaaaaaccccgtagagatttctgaacctgaccccatgtcgtatgaagatgtccaagtccaaacgtaccgcggtcctatcattgagttcagtccactcaaacgtgatacggatgacgagcgcgctccccccttgccccccaaacgcgtccgtaaagctgcatctaccgagcctttcaaaaccagccagacttcggtcgatagcatcttaaaaccgggtcgacagatacccgtcacccgtaacccagaccaattgaaaataaactctgagatgactgtagccaaaagcgaacccgcattgcccccggtcaagaagcgttcgttcttttcacgcctatttaggagaaaggagaagtcccctgctcccagtgttaaatctgagggtaggaaagaggccaagagtaaaccagtgggtcgatctgtgagcagtgtctcgggggtccgtccttccaagttcaagtcgtcggtgtctcacacctcgttgaaagacaacgcttctggcacaggcctcagttatgccgacagcatcacgcatatctctctccacggagacgagaatgagaagtccacatctcagtcgtctttgcgtcgtcccgccagtctagccccgctgccgccgacagatggcggcactatcttggtggcggaaagtgtgctcgctttagacgcgtctcagttcaagaagttgcaagacgacttagatctaactgacgcggagcactacgcgttgtacatggcggtcgcgccgcacgcgactgtttcagaattcgatgaaaccagttgctattactcgccggtagatggcagcaaatttcaaaataattaa

SEQ ID NO: 58 - DNA, 2475 bp, Spodoptera frugiperda
  misc_feature (1)..(2475): Kenny
atgctttttcttctaggaattatccagaaatcgaattcaacgatcacaattaaagatgaagatgggacagatatacaactgacagttttaaaatatccgataccacttgacagtcttgtctgtgagtcacaagactttgatgctagtcatgataaaaacaaagatagaaaattaaagaatgcaaaagctaaatacacgaatgtatcttttttaaaggaacctgtgcccttagatgctatcgaatggaaggacaatcaagaagttaagaactctattacgtttaacgtaaaaactgtgccaggaatactctatggagcatctagaacgaggaagacagttgtaaaagatcaaccatggaaggaaaatgcgttaatcatatttgaaaattcgtttgtctaccctttcattcatgcgaataataaatacaagtgttttgcttgtcccaaaacgtttttggacgcagtttctttaaaaaatcatacgacaaatgatcattccttaaaagattttaaaaggcaattgaataataaaactagagacaaaaatgtgaaagttgatgttacatatctacaatgtaaaatatgtttgcagacgctaccaaatataaacaatttaaaactacatttgaaggaacacggcaagaatatagacatggaatctgaagattatttgataccgttcaagttgagcggtgataattttgaatgtcaagtctgtggggaaaaatatctcaaactgagacttcttatcatccatatgaataaacatttcaataactttagctgtgagatctgcgggtcagtttttatctccataaatatgctgcaacgtcacttaaaaacgcatgaaaccggcagctttccttgtgataagtgtgataaggtatttagcaattcagctaagaaaagattgcattataaaggagtgcatcttaaggagtttccacgaagatgtcccatatgtccggagaggttcaattcaaattaccaaaggacgaagcatttgcgtatagtccataaccaaacgactggtttgtacagatgtgatacgtgcggaagggaatatgacttaaaataccatctcctaatccacataagatctgttcatcttcaggaaaggaatcaggagtgtcctatatgcaattcaagattcttttccaagtactgtctttctagacatatggttattcatactggagagaaaaattataagtgcgaagtgtgtgggaaagcgtatgcgaggaagaagaatttaagagaacattctaggactcatgacgttggtttgtgttcgatttgtggacaaaattgtggagatcaaagcagtttgatcgctcatgtcagtagtgtgcatgggcgatccggaccgcgcacaagtatctggcaaatgactgtggcagagagacaaaacgccgcaaccttcctagaattctcgactgtcaagcccttcttttaccaacaagctaatttcaaatgcttctattgcaatgaagtttttcctgaaattaacgcagttttacaacacacttcagtacatataccacctgaaagatgctgccttttaaagcagtatctaaggaaaggaaaacgagtaatcaaagttgacatatcaggcctcaaatgtaggatttgtgatcaaaagtactcagaactcgacgatttgcgcaaacatttgacggtgatacataaaaaagaatttaattcggccggcaatgggctcatggcttacaatttgaacatgatcaacggtcaactaacctgtcatatatgttcaaagacttttaattcattctttctactaaacaggcacatgaatgtacatttcaacgttgtgtgcgaaacgtgtggcttaggattcatttcacaccaaagactaatcaaccacagaatcgtccatcaaacaggcgctcacaaatgcgacaaatgccaagaaatattgccaacgaaattaaaattacgttaccatatgtttaaaaaacacgaatctacgaatacgaagaaaattaaaccgttaaaatgtcctcactgtttagaaagattcgcagaacactacagaaaaatgacgcatctgaaagaagttcatggaatatcgtttagttttgaatgtacggcttgcaaagctgttttggcgacgagacgcgctctaacggaacacacgacaagacttcatacgcagaagatacaatgtaaagtgtgtgggaaatgttttgggacgaaatctttgttaaaaatgcacatgcgtggacacactggagagaggaacttcttttgcgcgatctgtcaaaaggcctacatgcatgaacggactttgaggcaacatatgagggttcacggaccagtttggaagtttacgtgctctgaatgtggtaatggtttccataatagaaatgattataataaacatatgaagcagtggcacccgcaatggcagtttaagacgattgtcaagaattttgggaatgaaatcatgaattga

SEQ ID NO: 59 - DNA, 1605 bp, Spodoptera frugiperda
  misc_feature (1)..(1605): Ankyrin
tctcctaaaaagagacaagtgaagtgccataaacgcaaaaattttaaagatttgaattttggacaagagactaaggtgaaaggtggtcaaaagtctgagaccaatcaaggatactttgtgtttacacacagtgatgggtccagtagtgacgagagtaagattgggagtttgaaatctcctttgactccttcacctttaacaccctccccacaagatctagaatgggatgaagacataggaaatgttgcaccaactactagtgaagatgaatcctggacgtctatgtataaatggtatgctgctatactggagtcaacaggggcagctattgcttcagcctcagctatgttcactgcgggaattgatcagcatgatgcatttatgcacactccactacattatgctgcagaacagggtcatgttggtgttgttaaattgttgatagaagcaggttgtaaaatagatgctgagactggagatggtgtgacagctttacatgttgcagttatcaaaaattatattgatattgtgaagatacttataaattctggaagcaatgtcaaccacaaaacctatgatagtatgacacctttgcattttgcagcgtcaagaggtttcttagatctggtaaaaattctagtcagtaatggtgcaagtttagaagcaagagattcaaatgagaggacagctttgtatatagctgctggtcgtgggcatatggatgtgatgaaatatctgatagatgcaggtgctaatgtgaacagcgaagagatacatggatatacgcctctttgtgaagctgtatggcaaaagtatgcagttggtgtagaacttttattgttatctggtgctagaatcactcactctcataggcttttacataatgcaataatacaaagacagatggaaatagtaaaaatgcttactgcttatggtgccgggataaacttgtataatgacaatggagacacgccactgcttttagcggtacgactatctcagcccgcaatcgctaaaatattattatgtaaaggtgcaaacgctaacttgttaaacagtataacaggtgccaatgcattacatatagctgttgaaagtgtggattcccatgaagatttcgaggaattgttgaaatgtttaatagactacaagattgatttgaatgccacagctcttactggcgatactgctttaaacagagctctgttattacacaaagatcctgcagctgttcttcttattcggtatggcgcagacgtgaatgcctgtgatctacatgcttgtggtctagacaatttatccatagcaagtagaagaagatcgaatagcttagcattgatgttattgaaggcaggtcattacattgtgatgccagataaagatacatcaacttcagcatctgattatacaaagtgttggttgtataatgtttgtagggaaccacttactctttcagatctctgtagaattagaattagatacttaggccaaagtacatccacaacattgtaccgctttatatcttcattgccccttccaaagagtttaaaaagatatcttatgatggaagatgaaggtacagaatactttaactttactgaataa

SEQ ID NO: 60 - DNA, 1929 bp, Spodoptera frugiperda
  misc_feature (1)..(1929): caspar
atggcagaaaacagagaagaaattctagcaaattttcagggtataacagccatagaagatgttgctgaagctatttaccacctagaagaagcaaattgggacttgcttgcagccataaaccgagtgatgccacaggacgggaacagctcagccgccaatgacaatgacacacacgatgttgagatgatagacgatgatatatctgtgataactccaaaaactcacccaccagaccgggaagacacaaatcaagcatccacgtcaatgcatgtaaattttaatgccgctcccaatcccttcgtagaactacaggttcattgtaataataagatacatgaagtcaaaatggctgggagcgctactgttgctgacttgaagaaggaattggagaagaaatgtggcgtgccagtatgtcggcaacagttgtcggggctgggcgggtcgcgcgccaccagtaacgcgacactggtcagtctcaacctaccccctaatgcagtgctgcgactcaaggccgctgaaacgcttatggctgatgatgaggtggcagaaaggttaaccacaacatacatattgcacgtgaacgtggaagacaaggagtatacgctcaagtacccaggcacgaagacggtgcaagaagtcaagaacgacatatactcgctcacagacatacctgttaggcatcagtcgtggacaggctggccggcggtgccggggctggacgagaccgtgctggccatggcggggctcacgctgccgcagcacgagctcagcgtgcgccgcgcgcccaagaaggactataagaggataatagtggagagttcagacagtgagaacagttctgtggaggaggtggaggacacgacggagggctacaccggcgaggacgacatgttcgtggacctcgtgcagactgagcggttgcagccacttatgtcagaaagtgtagaagacgaggcgctaggttgtatcgagttcgcgcagcggttccgcgcacggtacgggcccaacacgccgcagttcttcgagggcaccttgcaggacgccatcaaggagtcctgtctcaaacctgccaaagagcgcaaactcctaggcgtgtacttacaccacgagcagtccgtgctgtccaacgtgttctgcgcgcagctgctgggctgcgaggccgtgctgcagaccctcgccgccaacttcatcgtctacggctgggacctcacgcatcccgacaacaataacatgctcctatcgtcagtaacgaacgcgctgggtccggtggcgagtatgacgatacgcaacctgccactggaccgcatgcccgcgctgctcatcatcatgcgggtccgctccaacaccgagatatactccgtcatcaatggtaacgtgggcgtgtcggagttgctgggtgggctagtggaggcgttggagcggttcagctcggcgcgggaggacgaggcgcggctcgagcgggagcgggacgccaggcagcgggtcaagcgggagcaggacgaggcctaccagcggagcttagaggcagacagggctaaagaagaagtaaaaaagaaacaagaagaagaaagaaatcaagagttagaacgtgcagaatcagaaagacaaatggaggaagctaaaaaagaggcggagcgtgcggaggcggcgatgcgggtccccgcggagccggcgggcgcggcgggcgaggtggcgcgcatccgcgtccgcctgccgccgccgcacgactactgtctcgagaggcgcttccacgcacacgacacgctcgaggcgttattagacttcctcgcatctaaaggttatccacaacaaagctttaaggtcatctccagttggcccaggagagatcttaccctggaatctccgactagcacactgaaggctctgaagctgtacccgcaggagacagtcatgctggaggagcggtga

SEQ ID NO: 61 - DNA, 1449 bp, Spodoptera frugiperda
  misc_feature (1)..(1449): duf
atgttccattggctaattaaaaccttctttacaggtcctccgaagataatttcaaatcagactcagtttgggtctcaaggcgacacagtgaacattgaatgtgctgccttcgcagtgcccaggatcgacaatattatctggacttttgatgggaaggagatcgattctatacatgatcaggactacgcatttttagaagagttacaatcaggaggtgtagtgaactccacgcttatcatcagagagagccagtctaaacatttcggtgtctacaaatgtaatgtctccaatgactatggcagtgataccatggaaattatattaaggcctaacaaaacattcccgctcctcctaatcctattcggagtgacatcaggcacaataatggtggcagcagtgatcatgctagtgatactgtgtcaaaggaagcagagaaagaacaaacaaacacaggtaacagaaaaaccagatgtcacagtgacggctgaagaattgtataaggaaaacgacaggaattccaatataagtgatctgaaactggaactgagacaggcaaatggcagctgtgagattgactattccaacactggatctgacagcacattatgttcgaacgctaaacttggtagcgggattccattggcaggaacagtgcctctatcatccataaaccagaaccagaacacataccagccgtatagatatagcaatgactatacagatcccgcgtacgctgattgttataaggtaaacggttttaacaacggttaccaaacatatgtacattatggtcatgactatactcctggctctttgagggtgcagtcaccgactatgagcagtgaaaagctgacacctaacaggtcagtcaatggtagtttgccacgcagcgtggatactccatcaacagtccagttcaacaacggcaatgggtctcagaacaactcactgcagagaaaacagaagagacaggatagtagtaacgcgttgaataatcttggactgcctactcctgatgcgagccgagtaccaaacggtggcatcatccatggtgtcgatgtccggtacgcggctacctacggcaacccccacttacggactgggggaggtctgggtttcgccaccacggtgaacaccgctaaaccagcatctactcctgcaccaccaccgtactcctcagttaggagttctgtggttttaccttcaggtaactcgtcacattcaataacgtcgccaaccagcctggcgtcgccacaatgtgcaaccagccccattaccacctcaaccatgtccactgacagtacgcaaccagcggtaacgacctcatcggcgacaccacaatcgccgagtgcgcactacatactggcaccatcgaataggactataagtaatgcgactgttactaaaaaaggtaacgggcatcaaacccctttagcaacccacgtgtaa

SEQ ID NO: 62 - DNA, 2442 bp, Spodoptera frugiperda
  misc_feature (1)..(2442): htl
atgtcactgtcactgtcaacgatgttgaggataaagtcattcgattacacggatgtaggcgtatttgtatgcaagttcgacaatgatgatgccacaaaattatcacttaagctcgaagtgaagccaaatccttataacccagataatggacgtgatcaccaaacagatataacacaagctgtgcagccagaagccttatcacaagttgtcaacaaaacacaagaagaagggctttctttaccagacagacgatatggcaaagaagatgacgatgaaagagcggagaaagatcatccaggttatggtcatatagatgagaaacaagattatttccctcctcgattcaagcatcccacgaaactatattacatggatatgaaacctgcagggaactcgataagaatgcgatgcgccgctgaagggaaccctacgccgaacataacttggtacaagaaccgaagtacaccaataactaggatgttcttccaaccatcttatggaaaatggtccatggagcgttacccatcgaaaccttacataaaggagaggtatcctggtaacgttacggtgttggtgaacgagacagcgaccctctcgtgtccaccagtgtcagatctggaaccgtatctatactggatccgaccaacaaattacacggtacaagatgccgaagttgggccgagtgatatgccgataccattcggagataccatacacaaaaatgtaacaacaaatttttttatagagcgtctttacgcgaagcccgtcctgacggcaggagctgacaaccaaacggtgttggtcggggaaaccgctcgtttcagctgtcagtttctcactgacatgcatccatcagtctactggatgtactttacaagagacgagaccttcgagaacgttactgttaaccccgctgatgtaacgctacagcagtcgatggtctactacgacaaaaataaagtagtcacgagtgaaaatccggaagacaagccagaacatctgacgatatacaatgtaacgaaggaggatgaagggtggtatgtctgtatagccctcaacagtttagggaacacaacggctaagggatacctaactgtattggaatcgcccccagtacaagaagcgccagaccatggaaagcacacattactgataaacatcctgacagtagtactaggagcaatgttcttcgtagctgccatcatagtggtgatgatttgcaagaagctgaagagagagaaagagcagaaacagctggcgatagagactgcgagggctgtgatagtgacgcattggacgaagaaggtcactgttgagaaaccacagatgaatgggtcgcctactgctacgggcgaagctttgctaatgccagtcgtgaaaattgagaagcagaagctgcaacaggtccagaatacgaccagcgattcgatgatgatgtcggagtacgagctgccgatggacatcgactgggaagttcctcgggactccctgtgcattgggaaggtgctcggagaaggagagtttggaaaggtcgtcaaggcggaatgcgtgggcatactgaaacctggcatgcagtctgtggtcgctgttaagatgttgaaagagggccacacggatgctgagatgatggctctagtctcagagatggagatgatgaagatgataggcaagcacgtgaacatcatcaacttgttaggatgctgcacacaagacggaccgctatacgtcatcgtggagtacgcacccaatggaaacctgagagagttcctcaggaaccatcgacctggaaatagatacgagtcgccaacagaagacttgaaggaaaagaaaacactaacacaaaaggatttagtttcattctcatatcaagtagctagaggaatggaatatttagcttctagacggtgtatccaccgcgacttggcagcgcgtaacgttctcgtctccgacgactgcatcctcaagatagctgacttcggtctggccaaggacgtgcacagcaacgactattataggaagaagacggaaggcaggctcccagtccgatggatggctccagagtcgctttatcataaagtttttactacacagactgatgtctggtcgttcggtgtgctcctgtgggagataatgacgctgggcggcacgccgtacccgaccgtcccggggcagtacatgtaccagcacctcagcgcaggacatcggatggagaaacctccgtgctgtagtcttgaaatatacatgctgatgcgcgagtgctggtccttctccccaggagacagaccctcatttactgaactggtggaagacctggacaagatcctaacagtcaccgccaaccaagagtacttggaccttggtctaccacaactggacactccaccatcaagctacgatggctcaggagacgaaagtgatagtgacttccccttcatcaagtag

SEQ ID NO: 63 - DNA, 1608 bp, Spodoptera frugiperda
  misc_feature (1)..(1608): axed
atgttgaattcgtgttcgagaaacgtttcaaaacctcaaaaaaggttacaggacagtatccctagcatgtccgtggcacaaaccaacgcttggatgaatgctgagaacatcaacaatggaggaagtctgtctctatccccgccgcacacggtatcgcagcgtgagactggtactcaggtgtctcaatgctacagtgggcccccgtctccctgcgggtccgcgagtgcaacgccttcccccacgacctctccggcccctccgcctggcgcggccactttagaccctaattggcaagctactaaacccactgtgcgggagagaaatgcagctatgtttaataaccaactaatgtcagacgtcacattcatagttggaggccctggccactcccagataattcctgcacacaaatatgtattagcgactgccagctctgtattttatgccatgttttatggaggattagctgaatgcaagcaagagattgaagttcctgatgtagaaccatctgcatttcttacacttcttaagtacatttactgtgatgaaattcagctagaagcagatacagtattatcaactctatatgttgccaaaaaatatattgttccacatttggccaaagcttgtgtcaattatttggaaactagtcttacagcaaagaatgcatgcttgctgctcagtcaatcccgattgtttgaagagccagaactgatgcagagatgctgggaagtgatagatgctcaggcagagatggccctgacttcagacggttttgttgacatagatgtgtcaacactagaatcagtattagcgagggaaacactcaattgcaaggaaatcaacttatttgaggcagctttagcttgggcacatgctgaatgtgtgcgcagagacatagatccaacaccaacaaacaaaagagtcatgttgggaggtgccatatatttgataagattcccaactatgtcactcgaggagtttgctaacagtgctgctcagattggtattttgaccccacaagagactattgacatatttttacattttactgcatcaagcaagccacaattgtcttatccaattaaggcaagagctggactaaaggctcagatctgtcacagattccagtcatgtgcctacaggagcaatcagtggaggtatcgtggcagatgtgactccattcagttttgtgtggacaaaaggatatttgttgttggatttggactttatggatcttcaaatggagcagctgactataatgttaaaattgaactgaaacgccttggcagagtgctggcagagaacaacacaaaattcttctcagatggatcaagtaacactttccatgtgtactttgagaacccaatacagattgaaccagaatgcttctacactgcttcggcagtacttgacgggagtgaattaagttattttggacaagaaggcttaagtgaagtgtatatggggacagtgaccttccagttccactgctcttccgagagcacaaatggcacaggagtacaagggggacaaatcccagaactgatctactatggacccacagtcaacacttcaatggccaacacgactactaatgaggactga

SEQ ID NO: 64 - DNA, 861 bp, Spodoptera frugiperda
  misc_feature (1)..(861): Rbm24
atggccaataacgacaactttgcacaagatgttactgataatcaactaaatggaaatgccgaaaatggtggtggcgatacgcaagaacataatagtgccgaagcccctgggcgtgatgatgacagaaaactttttgtcggaggcctgagctgggaaaccacagacaaggagttacgtgaccacttcagtgcatatggtgagattgagagcatcaatgtcaagactgatccaaacactggcagatcaagaggatttgcctttattgtgttcaaggcaccagattcaatagacaaagtgatggctgctggagagcacactattaacaacaaaaaagttgatccgaaaaaagcaaaggctagacatggaaagatctttgttggtggtcttagcagtgaaatatcagatgatgagatcaaaaacttcttcagtaattttggaacaataattgaagtcgagatgccctttgacaaaaccaagaatcagaggaagggattctgctttataacattcgagtctgaacaggtggtcaatgagctgctgaagactcctaagcagaccattggtggcaaggaggtcgacgtcaagcgtgcgacacctaagccagatggtccgggaggaatgggaggacgtggaggtcgtggcggtcgtggattgcggggcggtcgcggtcgtggcggatatggaggccagggcgcctggggcaacggaggttacggcggctatggctacggacaaggaggctatggcggcggctacgacggatacggctacggcggctacggttacgacggctacgggggctacggcggttacgattactctggataccccaattacggtaaacgcggcaagcagtactag

SEQ ID NO: 65 - DNA, 369 bp, Spodoptera frugiperda
  misc_feature (1)..(369): pirk
atgaagaagtactcgatcgttggaaacaagaagaaagtgacgatggaagtcaacccaacgcagctgaagatcgttgggaacaactgcatcgtgagggtctcagtgaaccacggagagatcgaagtgatcggcaatgactgccgcatcgaagtgtccgataaccatggagttattaacatggtgggaagtggtggaacagtgattatcagcaagcgatggaaaggtgaccgagtgcagttggtcggtaccagctgccatttgttcgtggctgggaaggagaggagtacagggtacgaggcccaactctctcccttcagcaaggacttggatgacgtcattgaatccatcttcacatttgtgatgcggtga

SEQ ID NO: 66 - DNA, 456 bp, Spodoptera frugiperda
  misc_feature (1)..(456): bendless
atggcagccctaccacgtagaataatcaaagagacacagcgattgatgcaagaaccggtgccgggaatcagcgcggtgccaagcgaaacgaatgcacgttatttccatgttatcgtcactggtccagaagactcgccgttcgaaggaggactattcaaattagagttatttctgccagaggattatcctatgtcagcgcctaaggttaggtttataacgaaaatataccatccgaacatagatcggctgggtcgtatatgcttggacatattgaaggacaagtggagtcctgcactgcagattcgcacggtgctgctctccatccaggcgctactgtcagcaccgaaccctgacgacccgctggccaacgacgtggccgagctgtggaaggtgaacgaaagcgaagctatccggaacgcgaaggagtggacgcggagatacgccatggacaactga

SEQ ID NO: 67 - DNA, 1356 bp, Spodoptera frugiperda
  misc_feature (1)..(1356): shadow
atgccgcgtccaaaatctctgcctcttgtgggaactaaattggattttatagctgctggaggtggttcaaaattgcacgagtatgtcgatattcgtcataaacaattaggttccatcttttgtgacaaattaggaggaagtgtagatttagtatttgttagtgatccagcactaataaaaacactatttctaaatcttgaaggaaagtatcccatacatatattaccagagccatgggaattgtatgaaaagctttacggttctaaaagaggcttatttttcatgaatggggaggaatggttagaaaatcgaagagttgtgaataaatatttattgaaagaaaattctgaaaaattattcgataatccagttaaaaatactatcaaccaaatgatacagaaatggacaattgaggcgaagaagggctcttatgtgccaaacttagagagcgaattttatcgactatctattgatgtgataatatcagcaatgctaggcagttctactttccataagtttagcgcacacaacgatgctttattgactgcatttgcggaagaagtaaaaaaaatatttcagaccacaacgaaattgtatggttggcctgttaacatgtgccagaagctgaatttaaaagtttggagggatttcaaaaattctgttgatatatcactattcctagctaacaaaattgtcgcggagatgataaataagaaacaacccaaagacggactgattaatcttcttattgaagaaaatctcaaaccagaaatcataaaaaggattatcgtcgattttgtgatcgctgctggtgatacgacgtcttataccacaatatggacattatatttattatctaagaacaaagatgtgagacaggaactatttaaaagaaattctattataaactatgcgataaaggaatctatgagattatatcctgttgcaccgtttttgaccaggattctgcccaaagaatgcatcttcggagcttacaaacttaaaggaggcactccaataatagtttccatttatacatctggaagagatgagcaatactttagtagagcaacagaatacctaccttatcgttgggaccgcaatgatgaaaggaggaaagatcttgtgaaccatgtgtcttctgcttccttgccatttgctcttggggcccggtcatgtataggtaaaaaactggcaatgctacaaatgacagaacttataactcagatggtacaaaactttgattttgaatgtataaataaagatgaagttacatccaaaacttctcaggtacttgtgcctagccaagaaatcaagttatctttctcgttgagaaaaccggaatgtgctgaatag

SEQ ID NO: 68 - DNA, 1539 bp, Spodoptera frugiperda
  misc_feature (1)..(1539): ABCH1
ataagaattaatttcgtttacaccactagacactattacacaacaaccttcttcctttcagtggatcaacatacccaacaaaccgtttctcttccaggccaggccaaccaagtggttgagctgaatgtgaccggaggagccctgggactgaacaaaatgtccaagagagaggaagctccctacgcggctgaggatgctcaagtcgtgggtctggtgttccatcagagcaaggaagtgctcatcgtagaccatggtgcagggtccaatggagatattcctggcaaagtaacggacgtgacacccgactgtgatgactgcggagactgtctaaactttacatctcgcgggaagataaaggcgttgatccagaagaacttcctcaggatgtggcgaaacattggcgtgatgctgttcatcttcgtgttacctgtgatgcaagtcattctgttctgtctggccattggaagggatcctagtggactgaaactggctattgtaaacgacgacgtccgcatcatcgatggctactgtccgtataactcgtcctgctcaatgaagaacctatcgtgtcgatacctggataatctgaacaatcatacgataaaggagtactacgcaaacctcacggacgccctgaaagcggtcgaggacggtgaggcctggggagcgctctacttcaacgagaattatactgactctcttgtagcgagactggctttggctgacactgctgacaacgaaaccatcacgtcttcggaagtacaagtgtggctcgacatgtccaaccagcagatcggactcatgctcaacagagacatacagttctcatacagggacttcgctaaggacttgctccaaacatgtgaatacaatccaaagctcggtgacatccctatcgacttcatggatcctatctacggcaacaagaacccatccttcaccgacttcgtagctccgggagttattctgacaatcgtattcttcttagccgtcgccctaacatcatcagcgctgatcgtggaacgtatggaaggtttgctggacaggtcctgggtggctggagtgtctcccggcgagatcctgttctcccacgtggtgacacagttcgtggtgatgtgtggacagactgccttggtgctcatcttcatgatatccgtgttcggagtcaagaataatggaaacatcgtgtttgtcatcatgttgactttgctgcagggtctctgcggcatgtgcttcgggttcgtgatatcagcggcttgcgagctggagcgaaacgcgatccagctggcgctcggctccttctacccgacgctactgctcagtggcgtcatctggcccatcgagggtatgccgtgggtactccgatacgtgtccctctgcctcccactgaccctcgcgaccaactcgctgcggtccatcctcacccggggctggcccatcactgaccctgaagtctacatgggcttcgtctcaacactagcctggatcgccctcttcctaatcgtcacattaaccattttgaagttcaaaagaaattaa

SEQ ID NO: 69 - DNA, 9588 bp, Spodoptera frugiperda
  misc_feature (1)..(9588): Dumpy
aaatgtgctattgttaaagaagtatcagtgccactacaagatcagaatccttgtgtaccatcaccatgtggaccaaattctcaatgtcaagttacgaatcgcatatcatcatgttcttgtttggagaactatgttggtacaccaccgaactgtcgagcagaatgcactgtcaactcggactgtccaagcactaaagcctgcataaaccagaaatgtcgcgacccatgcctgggctcgtgtggtcttcaaacagaatgtcaagtttatcaacatgctgctatttgtagctgcagagagggctacactggaaatccatttgaaagttgtcatgttaaacaaaaaattgaacctgtacctgcagtttacgacaaatgcaacccaagtccttgtggagcaaatgctgtttgcaatgatggacaatgcacgtgcatgcctaacttcttcggaaacccatacttaagttgtcgtccggaatgcacaaacaatgctgactgtcctcagagtgcaacgtgtgtcaataataaatgtatcaacccttgcaccaatctgtgcggacagggcgcagtgtgtgaagtgtataatcatattccaatgtgtatctgtccatcaaataccagtggaaatgcattcttttcatgcacaccaataacagtagtacacgaagagagagatccttgccatccaacgccatgtggtccatatagcatctgtcgcgcggtacaaggacaagcagtatgctcttgtctcattggctacataggtgtgcccccatcatgcaggccagaatgtctggtcgactcagactgcaccagtgtcatggcgtgttccaatcaaaaatgtaccaatccttgtcaaggatcttgcggattaaatgcggaatgtcgtgtccataaccacaagcctatttgttactgcagaaatggctacaccggagatccatttacccactgtgtagttgttcaagatgaaccaccgccaaagagaatgccttgtgaaccatcaccatgtggtcctaattctgtgtgtcgagcagtaaacgaatcaccgacatgttcttgtcagaccggatacatgggacaaccgccatattgtcgcccagaatgtacaacgaacagcgaatgtaactttgatcgagcatgtattaataacaaatgtgccgatccttgtgtgggtgcctgcggacttaacacagaatgtcgtgtcatcagccattcgccgcaatgtgcgtgcaaaccaggatatgaaggagactcattctatcaatgcactcctatcaaagcatcagttccggctgttgtcccgtcgcaaccagttgcaccatgcctgccgaatccttgtggaccaaacgctgtatgccaagaacgtaacaacgccggcagttgcacatgcgttacgggctatttcggtaatccctacgaaggttgtaggccagaatgtgttctcaattccgattgtcccgaaaatctcgcgtgtattaacaacagatgtcaagatccatgtcctgggttgtgtggaattaatgcacaatgtcaaatgatcaatcatattcctaactgtgcttgcacatctggatacgtgggtgacccacatgacaggtgcattctgagagaagaaccaccacaggacccttgtaacccatcaccgtgtggcccatacagcacatgcaatgctatttctaacaaagcaatatgtacttgcctcaaggactatattggaaacccgccaaactgcagaccagaatgtgtaatgagctcagaatgtcctttgaacaaagcatgtgttaagcagaaatgtattgatccatgcattggagcgtgcggagaaaacgcacagtgtcgggtcctacaccacagcccatactgcacttgtttaccaggtttcgaaggagatgctttcattagatgcacgaaagaaaaagtactaccaccacaagtaaaatctccttgcgaacccaacccttgcggtccattctccacgtgcagggactccgcgggttcggctatctgtagttgcaaggaaggttacttcggggctccacctcgttgtgcgccggagtgtgccatcaacgaggattgtcctaatgacaaagcatgtgtgagggcgaggtgtgtcgacccttgcattggatcatgtggctcaaatacagagtgccgtgcaatgaatcatcttgctatttgcacctgtttaagaggttatcgtggtaattccttcgtcggatgttaccagtttgatgaaccacaaacaccaacatttacggacccttgtgcgcgaaatccgtgtggaagtaacgcaatctgtagcaacggaacatgttcttgtataccgggatatcacggaaaccctgcaattgaatgtcggcctgagtgtaccactgatagtgattgtgacaaacgacaagcttgcgtaaactacaaatgtgtcgatccatgtaagaatgcatgtggcctagatgcagtgtgtaatgtctacaatcacatagctatatgtgagtgtcccgcaccgctacaaggagatgctttcatagcctgccgacgtgtaatagccctcgagtctgaacctaaaaagaagtcaccatgtcccgattgtgggccgaatgctgattgcgttgacggccgctgtcgttgccacgcaggattcttcggggcacctccgttctgtcgttacgaatgtctgaaatctaatgactgcgaatggcatctaacttgcgttaacagacgttgcatagatccctgtcccggagcgtgcggttaccgtgctgagtgtgtgccagtagctcacgagccacgctgcacttgtccatcgtctaccaccggcaatcctcttacagcgtgtcatcccatcgaagatattcctaaacagccaaacgatccctgtgtgccatcgccctgtggacctggcgctttgtgccgagtaaaaggaacaagtgcgtcttgtgaatgcgagcctggattacgcggagatccgtatactggatgccgacccgaatgtctcgcggactctgattgcccaccttctaaagcttgtatacgatctcactgccgtgacccttgccagggcacttgtggagttggagcggattgtgaaaccgtcaaccatatgcctttatgttcatgcccacctggaactagaggaaacgcatttgaaagatgctatacagaaatgacccagccaccgtgtacaccatctccctgcggccccggcgcgttgtgctcagtggtcggtgacagtgccatgtgcacgtgtcccagtggcactagcggtgacgcagccaccacaggatgcaggcccgagtgcgtggtcagctcgcagtgtccccgagatcgcgcctgcgtgcgcaacaagtgcatagacccatgccctggaacttgtggcaacgctgccatgtgtcgcgtcttcaaccatgcacctatatgctggtgtccaccggccactacaggcgatccatttgttgcttgcatagatactccaacaaaggcccacgacccttgtgatcccaacccttgtggcccgcacgctacctgccgcaatggaatatgcacatattacgaatgtaccgtcaatgatgactgccctggtgaccgcgcttgtatcaacagaaagtgcaccgacccatgtattaatgcatgtggtctcaacgcgatctgcacaggcgtgcgacattccccggtttgttcatgtccacctgggtacacaggctctccgctggtgcggtgtagccccatctcatcgcagccgccggcacctgaatgcatgtccgatgaacagtgcgctgacaacgccgcgtgtgttgactcgcgctgttcacccgtgtgcggtcctaacaactgcggactgaatgctcggtgcattgcaaaacaacatagagcattatgcacgtgcctaccgggatacgagggcgacggatacacaggatgttattcagtacaatgtcacagcaacaatgactgtccggacgatgagagctgcgaaagcggttcttgtgtgaaggtctgcctacgtattcgttgcggaacagaggcgcattgtgttgcacgcggccacagtgcttcgtgtgaatgtaatcctggcgccaacggcaacccatggactggatgtcgtagagccgaatgtgtcatagacgacgattgtccctcatggttagcttgctctcgcagcaattgtaaggatccatgtctcggagcatgtgctcaaggtgccatctgttcggttgttcgacatgtcccgacgtgtgaatgcccgagaggcactcaaggcaaccctaagattgaatgccgaccagttgtagacgatacgcaatgtttctctgatggggaatgtggaccggacctagcatgcttgcaaggtgtatgtaagaacccctgcgaaccgacatcttgtggcattcgagcagaatgtagggttgcgaatacattgccgttccgtacgctcgtttgtgaatgtccaaagcctcttattggtgatgcctcagtccaatgcaacccaaggggtgaatgtaatgcagacagcgactgcagttctgaggagcactgccgtaatcgtttgtgcgttagcgcatgcgcagatataacgtgtggttcaggtgctgaatgtagggccaatcaacatcgtgcctcttgttcctgtgtaccacctctgcaaggaaacccagaagtcgcatgcacactcggagctcctggagtgatatgtacaacagattcagattgtggtagcgctgaagcctgtatcgcacaacgatgcgtgtcagcgtgtgcgggagcttgcggcaccggcgccttgtgcgacgcgccgcagcatcgtgcccgctgccactgtcctcccggcactgccggcgaccctgcccgcctctgctatacccccgaatgtacatcagatgaaaattgtccatttgacaagacttgtgttaatggatactgtcaagacgcttgttctctcggtacgccatgtggaagagacgcaacctgcgtggcagtagcacacattgccagttgtcgttgcccgcctggcacccagggtgacccacgacgtgcctgcgtatctgctatctgtcattacaatgaagattgcgacgacacgcagatctgcaatcgactcaatcgtgtatgccaaccggcatgttccgaacaatcatgtgccccagacgccatttgcactgcgcgcaaccaccgcgtcgtttgtacgtgccccgccggtcgcagcggcgacccgtacggcagtggctgcagcacaccgcacgacgacaccgagtgcaccacagactcagattgcccggctccgtttgcctgtacgaacagccgctgcgtagacctctgtctcggaaatccctgcgaaaccggactaatttgtaagatcgtcgacgtgcttccgctacgcgccgtggcttgtgtttgtcctgatagtggtcgtgtggcaccagacaatggttgtcgcgctccacctgaagccgaatgctcagttgattctgaatgcgctaacactcaaacttgccgtcgtggcagctgtgtcgaatcttgtcgggcagatccttgcggacaaaatgctctttgcgaatccatcgaccacatatctcgttgtacttgtgcaccgggatacacaggaaatccaagaatcgaatgtaatacaatacccagacaaccggccattttcgaatgttacaacgatgaggaatgtggtccagaacgggcttgtaatgacgaccgtgcttgtgtaaacccttgtaatgacgcttgcggcctcggagctctgtgtagagttatagatcataagcctcaatgctcgtgcccgataggatattcgggcgatgctaacactcgatgcacaccaccttctgacaaatcgattatccccgcgggctgcaaagcaaatcacgattgcccactgtctcaagcgtgtgtaaatggagtgtgcgcaaacccgtgcgcctgcggctctaatgcagagtgcactgttgtgcgacaccatcctgtctgctactgcgagcgtggctactccggcaatccttacatcggttgcactaaagttggttgtacctctgattccgagtgtcctgatagtgatacatgttacaacggcgcttgtgtcaacccttgcgtagtggaagctccgtgtgctgtcagcgcagaatgcttcggtaaagcacacagacctaactgtcgttgcccggctggaacatttggaaatccctacactagatgtcaagcagcagaatgtgagattgataatgattgtaacgatgacagcgtgtgcgtaaagggaacatgtcgcaacgcttgctcgaacttcggtggaaacccttgtgccaacaatgctgaatgcttcgcacgaaaccacgctgcgtcttgcaaatgtcctcctgcactacctctaggagatcctttggttcactgcctgaaagtcgacgttattggagaacctgaatgccgcatggatagtgaatgtcctagtggctatgcttgcctccgagacgaatgtcgcgaagcttgtagtgaactgaaaccatgcactggcaacgcccgttgtactgtatctgacagtgtaccgttccgaactctcatatgccgctgtccagatggatatattcccgaagaaggaggaaactgtaaacctgcacaactacctacgcctagctgtttatcggataaggactgtgacgaccacgaatcttgtatcgatagaatttgtcgcaacccttgcaactgtggggacaacgcagaatgcttcattcggaatcacagacctatatgttcgtgtcgcgaaggattcgaaggcgacccataccggcgatgccacattgttggctgtcgcagcaactcggaatgtccatctcatcaagcgtgtattaatggtaactgcattagtccttgcctcttgaatagcacctgtggatcgaattcagaatgctacgtagaaaggaatgtaccactgtgcagatgccgacccggattcgaaggcgacgtttattcaggttgccacgcaatcgaatgcagaagtaatggcgactgcccactagacaaacaatgttgggctcatagatgtgtaaatccatgccttaacgagaatatatgcggtacggcagctacatgcttggtgagaaaccatatcgctgtatgtaaatgtgaacaaggttacacaggaagcccatatatcgaatgtagaccaccaatcaccgcagagtgttacatggatgctgattgccctcccagaatggcttgtttggcatcaaggtgtgtcaacccctgcacagaattacggccctgtacggctccagcacaatgtgaagtatcaccaacactacctgtgcgcactatgttatgtacttgtccacctgggtatgtgagcagcggcggaggtatctgtcgaccagtaacatctatcactgatgtcatttgcaccaatgacgataactgctcagctaacaatacctgcgtaaactcggtatgtaaagatccatgcgaatgtggacctaatacagattgtcaaataaaagaacacaaaccggtctgtgcttgccaacccggcttcatcggggatgctcgcactggatgctacaaggttttatgtcaatctgattcacaatgtgcagatgacgaaacttgtttcaatagccgttgtatcccagcctgctcagtggattccgacatatgtggagaatcagctgaatgttatggcattgaacatcgcgcctcctgtaggtgcaagattggtactataggcaacccatcgatcgcgtgtacgcctattggctgccgatctaactctgactgtccattagataaatcatgcatcaacaccaaatgcgtgaacccttgtaatgcaacctcttgtaacgatcctgctgaatgcagagtgcatcttcatgagttgcactgtgtttgtccacctggctaccaaagcactgaagatggatgcgtcagcactaaacagccacaatgcatcactgatattgactgtcctcctggaactgcttgcctgaacgcaaaatgtctgaacccttgtctggaaataaagccttgcggtatcaacgccgaatgcaaggttgtgcacaccctaccagtcagaactatgatatgtgaatgccttccgggatacaaaggaaatgctcttgtcgagtgcacttccaacagacgaccaattcaagagtgtattgaaggacaaggaattgactctactggtgaatgtgtgccatgcgtcgctagtgacggccgtgtgctagacgcgcgcggccgctgcgtgtgcgacgcgacccgtggcttcgtggcgcgcggcgacaggtgcgagccgcgaggctgtcgcgccgacgcccagtgtgatgaccgcgagcgctgcattaacggcgcttgtgtggacgcatgtatggccgagccgtgtggtatctcagccacttgtgatgcgatcggccatcgctcacactgcacctgcattgcgggctataccggcaacccacgcgttcattgcaacaccacgaaccctccagtttaccgtaccgatttccctctacctgatatgcaggttcactgtctcgccgacggcgtccgggttagtctgaagatcaaggacttcaacggtgtgttgtatgtaaagagttacagtaaggacgaacgctgccgactggttgtagatacacctaaagatgaggaaaatattgtcgacttcaccgtgcacttcggagaatgtggcttagtgcatgtgaatggccttgctagcttcgttcttgttatgcaaaaacatccgaaacttgtgacttcaaatgccaaggcattccacatcaaatgtatataccagacgggcgaacagaatgtgacgcttgcattcaatgtatcaatgctgacaacggctggcaccattgctaatacaggaccgccacccacttgttcaatgaggatcgtatctcgctccggcagccaagttagctctgcagagattggagaacatctagtcctgcaagttgatgtacaaccctcaaatatttatggtggttttgctcgaagctgtatagcgaagacaagccaagtagctacaaatgaggagaccgaatatcaggtcacagatgctgacggttgtgcaactgatccatcaatctttggcgaatgggagcgtagcgaagacggcagcgtactgcgagtcgcttttaacgctttcaagttccccagtagcgataacatacgattccaatgtaatatacgagtctgcttcggcaaatgtcaaccggtaaattgtcgcggtgctgacgcttttggcaagcgacgtaaacgagaagcgatcgacagcagaccatcaggttcccccgcaggccagttccgcgaggaagtgaccgtcgagtcgaaccaaattctaacgctacagcgacgtgatccgtcgcaggtagcacgacagcgcgacgccggcggcgcggcgggcgcgggcgctggcgctggcgaggtttgcgtgtcggcggctgggttggcggtggcgctggcgttgacggcgctgctagcgctagtggcagtggcggcagccgtggcgtgctggctggtggcgtggagacgcgcgcgcccgccgcccgctcccctgccgcacccggccgacttccccaacccgctgttccagcgctga

SEQ ID NO: 70 - DNA, 1068 bp, Plutella xylostella
  misc_feature (1)..(1068): dorsal
ttcaccaacctcggcatccagtgcgtgaagagacgagacattgaagatgccttggctgtgcgggaggaaatgcgcgtcgaccccttcaagaccggtttcagccacaagaactccccacagagcatcgacctgaacgccgtccgactctgcttccaagtgttcctgcccgacgagcgatccggcaagatccgccacgcactgccgcccgtcgtctccgatgtgatatatgacaagaaggccatgagtgacctggtgattacgaggctgagtcattgttctgcgcccgcgcagggcggcaagcaagttatattgctgtgtgagaaggtggcccgtgaagacataaccgtaaccttcttcgagaagtccggcgagcgcgtgacgtggcagggggacgcggcggacgtgttcgtgcacaagcaggtggccatctgcttccccacgccgccctaccgcgacccgcacgtgcaggaccatgtgcaggcgtacatccagctgcgtcgtccgacggacaacgctacgagcgagcctctgcccttcgagctgctcccgtccagcgcagatccgaattcagcccgccgcaagccgccgccggacctctcgctgctgacgctactgctgcaggaccccaagcgtgaccccaacaacaaccagcacaccgactccgtcgtcagctccacgagtgataccactgaggagctggccaacggcatggacgtcacagagacgatcgtcgttgaggataataacgctaagagtctcaacgagttgctagatcaagtggcggagctagacgagatttattcggagaataggacgcggttagagacagtgtcgcagctacagcatagcactgacacggagatggaggactttaacgacgcgggcacgtatagtagtctacaactcgcgtttaagaacccggtggaaatagcggagccggaaccgatggcatacgaacctgtgcatacgttccgctcgccggtcatcgagttttcccccctaaagcgagatgatgacgacgacgagcccgcgcccccgctgccgcccaagcggcgcaagactccctcc

SEQ ID NO: 71 - DNA, 543 bp, Plutella xylostella
  misc_feature (1)..(543): Kenny
ttagattcagttgaagatgaatctttcatcatcttagggtcttcccctggaactagtatggacgctaaatgcaatggtgccggtctaccgataactgaaacacctctgaaagcggctgacattgaggaggccatgaaagatctgtctctgaccgcaaatatggctttcaaggctcatttcaagcttggtgattgtccgtccccagccagtctgatggcagccagcaccatagtatccgaagacaagaccacggagcagctgcagaagagattcggggagatcctcgacgaaaacgtaatcctcaaagagactttaaagcagaacaacgagtctatgaaggaacagtttctgctcatagcgtcctgtcaggaagacatgctgaatacgcacaagatgcatcgggagaagtttgaggagacgcgcggattggtggaaaagttacgccaagagaacaaaaaactcaagatggagatgtctcgcctatccgactctacttcaaactcgcagcccaacagtgtcaacgcagtcgacagtctgaccaaa

SEQ ID NO: 72 - DNA, 759 bp, Plutella xylostella
  misc_feature (1)..(759): Ankyrin
ggggctgatgctaaggccgtagcgaagaacggtcacaccccgctgcacatcgcggctcgcaagaaccaaatggagacggcagcgaccctgctggagtacggagccatcaccaacgccgagtcgaaggctggcttcactccactgcatctggctgctcagcagggccacacggacatgtgctccctactcctcgagcacggggccgacgtgaaccagcaggccaagaacgggctcgcggccatccacctcgccgcgcaggaggaccgcgtggccgtggcgcagctgctggctaagaatggggctgagatggacatagagactaaaggcgcgtacacgccgctgcacgtggccagccactacggacaggccaacatgactcgctttttgctcgacaacgacgcttcagtcaaggcacagactacacatggctacacagccctgcaccacgccgcccagcagggtcacatcaacatcgtcaacatactgctggaacacaaggctgacgccaacgccgttactacgagcggccaaaccccactcgacatagcctggaagctgggctacgtgacggtgatggagaccctgaagggggtgtcggaggtgaccacgccccccgcgcccccctcccagctcaagtacaaggtggtggccccggagaccatgtacgagaccttcatgtcagactcggaggaggaaggaggagaagacacagtgctgaacgatcagccataccgctacctgacagctgatgatatgaaa

SEQ ID NO: 73 - DNA, 711 bp, Plutella xylostella
  misc_feature (1)..(711): caspar
aacagttcagtggaagaagtagaggactcggccgacgggttcgtggccgaggacgacatgttcgtggatctcgtgcagtccgagcggttgcagcccttaatgtcagaagcggtggaggacgaggcgatcggctgcatagagttcgggtcgcggttccgcgcgcgctacggacccaacacgccctcattcttcgagggaaccctggcggacgccatcaaagaagcctgcttgaaacccgctaaagatcggaagctcctcggcgtgtacctccaccacgagcagtccgtgctgtcccacgtgttctgcgcgcagctgctcggctgcgagaccgtgctgcacacgctggcgcacaacttcgtgctgtacggctgggacctcacgcacgcgagcaacaaccagatgctcctaacctcaatagcgaacgcgctcggcccgatggcgtccatgacggtgcgcagcatccccgtggagcgtctcccggccttactggtcatcatgcgcgtgcgcagcaacacggagatctactccgtcatcaacggcaacgtcggagtctccgagctagtaggccagctagtggaagccatcgagcggttcgcggcggctcgagaccaggacgcgaaggctgaacacgagcgagaggcgaggcagcgggtgaagagagagcaggatgaagcgtaccagcaaagccttgaggctgacagagctaaagag

SEQ ID NO: 74 - DNA, 438 bp, Plutella xylostella
  misc_feature (1)..(438): duf
gccgctgagataacgtgggtggacgggcaccaggcggtcatcagggacggtgtggagaccaaggtggagctgatgcccgacggacagcggttcaccaccaggtcgaccctccggctgacccccagcatggagcatcacaacctgacggtgacgtgccaggcgcagaacacggcagacagggcctataggatggccttcgtgcatgtcgaggtgaaatacgcgcctaagctgaccatgtccctgtcgtctcccgccgtcaacaacatgatcagagagggcagcgaggcccggatacgttgcgcggtggcggcgaacccccccgcgcacgcgtacacgtggtacctggacgaccaccccctcgtcggggactacacggatgagctgataatattcaacgtgacgaagaagctgaacaacgcggaggtgaagtgcgaggtg

SEQ ID NO: 75 - DNA, 1413 bp, Plutella xylostella
  misc_feature (1)..(1413): htl
  misc_feature (1252)..(1260): n is a, c, g, or t
ggctggtacgtgtgtgtggctctcaacgggctagggaacaccaccgcgaaaggatacctcactgttcttgaatccttaccaccagaaaaagaaatagtggatcacggaaagcactctctactcatcaacatactgactgcggtactaggagccatgttctttgtagcggccatcatcgtcgtgatgatcttcaagaagctgaagagggagaagataaagaaacaactggcgatcgagacggcgagggcggtgatcgtgacgcactggacgaagaaagtgacggtggaaaaaccgccgatgaatggtgctacgcccgctgcggagcatctgctaatgccagtagtcaaaatcgaaaagcagaaactccaacaagtgcaaagcaacaccagcgactcaatgatgatgtcagaatacgagctcccagtggacatagactgggaggtgccgcgagagacgctggcgataggcaaggttctgggcgagggcgagttcgggaaggtggtcaaggctgaatgcatagggatactgaagcccgggatgaatagtgtcgtagctgttaaaatgttgaaagagggccacacagacgcagaaatgatggcgctagtctccgagatggagatgatgaagatgatcggcaagcacgtgaacatcatcaacctgctgggctgctgcacgcaggacgggccgctgtacgtgatcgtggagtacgcgcccaacggcaacctgcgggagttcctgagaagccgccgccccgggaacagatatgaatctccaacagaggatttgaaagacaagaaaactcttacacagaaggatttagtctccttctcataccaagttgcaagaggaatggagtatttagcatctagaagatgcatccaccgtgacttggcagctcgcaacgtgttggtctccgacgactgtgtcctcaagattgctgacttcggcctcgccaaggacgtccagagcaacgactactacaggaagaagactgagggcagactgccggtgcggtggatggctcccgagtctctgtaccacaaggtgtttacgacgcagactgatgtctggtcattcggcgtgctgctctgggagatcatgacgctgggcggcaccccgtacccgacggtccccgggcagtacatgtaccagcacctcagcgccgggcaccggatggagaagccgccctgctgcagtcttgagatatacatgttgatgcgcgaatgctggtccttccagcccaacgaccggnnnnnnnnnccgtcgttcaccgagctggtcgaagatctagacaagatcctaacagtcacagctaaccaggagtacctagacctagggctgccgcaactagacacgccaccgtccagttacgatggttctggagacgaaagtgacagtgaattccccttcata

SEQ ID NO: 76 - DNA, 1203 bp, Plutella xylostella
  misc_feature (1)..(1203): axed
  misc_feature (563)..(615): n is a, c, g, or t
cacaaatatgtgttggctacaggcagctcagtgttctatgccatgttcttcggcggtcttgcagagtgcaagcaggagattgaggttcccgatgtggaaccatcagcattcctcacattgctcaagtatttatattgtgacgaaattcagctcgaggctgacacggtgctatcaactctgtatgtcgcgaagaagtacatagtcccacatttagcaagagcatgtgtcaacttccttgagactagtctaactgcaaaaaacgcctgcctgctcctcagccagtctcggctatttgaggagccggaactacttcagcggtgctgggaagtgatagatgcacaggccgagatggcgctgacgtcggaggggttcgtggacatcgacgtgtcgacgctggagtcggtgctggcgcgggagacgctcaactgcaaggagatagccctgttcgaggcggcgctggcgtgggcgcaggcggagtgcgcgcgtcgcgacgtcgaccccactcctcagaacaggcgagccgtgctcggccgcaccatctacctgatcaggttcccgaccannnnnnnnnnnnnnnnnnnnnnnnnnnnnnnnnnnnnnnnnnnnnnnnnnnnnacgccgcaagaaaccattgatatatttttgcatttcacggcggccacgaagcctcacctctcatatcctactaagataaggacaggactgaaagcacagatctgccaccggttccagtcgtgcgcgtaccgcagcaaccagtggcgctaccgcggccgctgcgactccatacagttttgcgtcgacaaaagaatatttgtcgtcggattcggactttacggctcatccaacggagcagccgattacaatgtcaagatcgaactaaagaggctggggcgagttctggccgagaacaataccaaattcttctcagatggctcaagcaacactttccatgtgtattttgaaaacccaatacaaattgagccagaatgtttctacactgcttccgctatactagatggaagtgaactgagttactttggacaggaaggtttgagtgaagtgtacatgggcacggtgacgttccagttccactgctcatcagagagcaccaacgggaccggggtgcaaggaggccagatcccggagctcatctactacggacccaccgtcactaccacatccagctcaaccacaaatgaggac

SEQ ID NO: 77 - DNA, 552 bp, Plutella xylostella
  misc_feature (1)..(552): Rbm24
actgctcatgtcttgagcgcgcaggcggccgcgcacgccgccgccaccgccgcggcgcaggcccaccatcagcaacagattgctgttcaacaaataatcaaccaccccacagaatccccgtcttcgggccggtccacaccggtgacgtcacaagccaatggctccgcaaccacaatctcaacgggcaccacttcaccgtctccgagcaaactctttgtcggaggcctcagctggcaaaccagttcagagaagctacgggattacttcgcaatgtttggcccggtcaccgacgtcttgatcatgaaagatcctgtcacacagcgctcgcgcggcttcggcttcatcacgttccaggaggcgtcctccgtggacaaggtgctggcggtgcctgtccacacgctggacggcaagcgcatcgaccccaagcacgccacgcccaagtcggcgccgcgccccgccaagacgaaaaagatcttcgtcggaggagtcggccaggacacgtcggccgaggaagtaagggcatatttctcgcagttcggccacgtcgaggac

SEQ ID NO: 78 - DNA, 1566 bp, Plutella xylostella
  misc_feature (1)..(1566): pirk
gtgatcgtcagctgtctgcgcggcggcgtcgcgcagttccagcccatccgctcctttatgcacttcctgaacgacggcgtgaaccagctggagtcggagccgcccgaccagcccaacctgctcaaggagtatgacttcatcatcgtgggcgcgggcacggccggctgcgtgctcgccaaccgactgtcagaaatacccgactggaaggtgctcctcatagaggcgggacaaaccgagaacttcatcatggacataccgctgctcgccaactacctgcagttcacgtccgccaactggaagtacaaaactaaaccgtccaagaaatactgcgccggcttcgaaaaccaacagtgcaactggccgcgaggcaaggtcgtcggcggctccagtgtgttgaactacatgatctacaccaggggagctaagcaagactacgacaactggagtgctctgggtaacgaaggctggagctacgacgaggtcctaccttacttcaagaagattgaaaactttaatatcccgtcgttcgataatccgaaatatcacggcaaggacgggtatttaagtatcgagcacgctccattcaggtcaacaaaaagtaaagcctgggttaaaggtgcaaaacaaatgggtttcacgtatggagatcataatgggccgaatccttcaggagtatcatttctacaactatctatgagaaatggaactcgacacagttcaagcagagcctacttacatcctatcaataaacgaaacaatctacacttggccaaaggaagtatggtaacgaaactcataatggaaggaaagaaagttattggtgttgaaatggaacgtttaaatcaaaagtataaaattttagccaaaaaggaagtattagtttctggcggggccatcaactctccgcagcttctaatgctctcgggtatcggaccggaagagcacttgaaatctttaaacatacccgtcgtccaggacttaaaagtcggctacaatctcatggaccatatagccgctggaggcctccacttcatagtgggccagaataccgaaactatcagtgtacgaactgaatacatcatgaaccacttggagatagtgttccagtggatgcagtcgcacaagggcccgctgtcgctggcgggcggctgcgaggcgctcgtgttcctcgacctgcaggacaagttcaacaccaccgcctggccagacatggagctactgttcatcactggcgggctaaacaacgacccagcattacctcgcaatttcggtttcgacgaacagatattcagcgagactttcagtgcgttaggaaagaacgaggcattcatgatattcccgatgttgatgagaccaaaatcgacaggtcgagtttcattgaagagcagaaacccttacgtgcacccgacaatcattcccaactacttcgaatacccggaggacttgcagaagatagtcgaagggatgaaggtggcgatagagatcgcgcgtcagccggcgatgaagaagctcggggcgcggctgtacgacgtgcctatcgaagagtgcctgaagcacggacgggcc

SEQ ID NO: 79 - DNA, 456 bp, Plutella xylostella
  misc_feature (1)..(456): bendless
cagcgatcggcgcggatcacacgggagatgaagaacttcgagaagcgatctccgtacggtatcacctgcatacctcttgagggggacaactacgacgtgttgcatgtgtccatgctgggcccgcggggctccgcgtacgagaagggcatgttccgactcatcatcaccatcccggacagataccccttcgaaccgccgctcgtgaagttcaagactccggtttaccaccccaacattgataaagagggcagaatctgcatggacatgctgaagatgcccccgaagggcgcgtgggtgccgaccatcacgctggagacgctgctggtgtcgctgcagaccctgctcgggaaccccaaccctgacgacccactcatgatggacatcgctaacgagtacaagaacgacaaagagatgtttatgaagaatgctaaagatcacactgagaaatatgctaaa

SEQ ID NO: 80 - DNA, 591 bp, Plutella xylostella
  misc_feature (1)..(591): shadow
gacctttacaaactgtcaactaatgcagtaatagcagttttaatgggatcatcttcaaaagtacaaaaaagtatgcactttaatgaacttttatgtaaattttcggatacagtaaaaggaatttttgaaacgactacggcgctatttggattaccagttaatatctgtcaaaaattaaacctgctcgtctggaaagatttcaaggaatgtgttgatgaatctctcatattggcacacaaactaataaatgaaatgttggatcatagaaaccaaagtgatggtttgataaaaaaattaagcgacgaaaacataacagacgaaaatattataagaatagcagcggattttgttatggctgcaggagatacgacttcatatacgacattgtggacgatgcaccttttatcaacgcatagagaagtcacggatgaaatattacacaccaatggtacatacgtaaagaacgtaataagagaatcaatgcgactctatccagtagctccgtttttgaccagaattctccctaaagatagctttataggaccatacaaattgcagcaaggcgttcctgtgatagcatctatctatacc

SEQ ID NO: 81 - DNA, 2013 bp, Plutella xylostella
  misc_feature (1)..(2013): ABCH1
tctgggtggatctgggtgctgggcggcaagcccgggactaaaggctcgggcgtgccgggcaagcgcgtgggctacatgccgcaggagatcgcgctgtacggagagttcaccatcaaggagaccatgatgtacttcggctggatcttcggcatgaagacgtcggagatcctggagcggctgcgcttcctgctggacttcctcgacctgcccagcgagaaccggatggtcaagaacctcagtggcggtcagtcgcggcgcgtgtcgttcgcggtggcgctgatgcacgaccccgagctgctgatcctggacgagcccacggtgggcgtggacccgctgctgcgccagtccatctggacgcgcctcgtgcgcatcaccggcgccgccgacaagaccgtcatcatcaccacgcactacatcgaggaggcgcgccaggcgcacaccataggtctgatgcgcagcgggcggctgctggcggagcagtctcctcaggcactgctgcagatgtacaactgcatctcactcgaagacgtcttcctcaagctgtcccggaaacaggcaggtcaatccaaccaggcggtggagctccaagtagccggcgggctcgggctcaccaagctgtcgcggcgcgaggaggcgccctacgcccacgaggatgcgcacgtcaaggggctcaacttccaccagagcaaggaggtgctcatcacggaccacaatggcgttagtaatggcgatattcccggcaagatcgcgccgagtatgaaggctgactgtgatgactgcggggattgcttgagtccactcctgaatttcacctcccgagggaagatcaaggcgctgatccagaagaacttcctgcggatgtggagaaacatcggggtgatgctgttcatcttcgttctgcccgtcatgcaggtcatcctgttctgtctggccatcggacgggaccccgtcgggctgagactggcgatagtaaacaacgacgtgaacgtagtggacggctactgtccgtacaacaacacgtgctccatgaagaacctgtcctgccgctacctcgaccacctcaagaaccagtccatcatcaaggagtactacgccgacctcgaaagcgccatcaacgcagtcaaggaggggcaagcgtggggcgccatctacttcaatgagaattatacagactctctggtcgcgagactggctttggctgacactgcggacgacgagaccatcgagtcgtcagaagtgcaggtgtggctcgacatgtccaaccagcagatcggcctcatgctcaaccgagacatacagttctcatacagggactttgctaagaacttgctgtcgacttgcgactacaacccgaaggtgggcgacatcccgatcgacttcaaggagcccatctacggcgacaccaacccctccttcactgacttcgtcgctcccggtgttattctcaccatcgtgttcttcctggcggtggcgctgacgtcgtcggcgctgatcgtggagcgcatggaggggctgctggaccgctcgtgggtggccggcgtgtcccccggggagatcctgttctcgcacgtcgtcacgcagttcgtcgtcatgtgcggccagaccgcgctcgtgctcgtcttcatgatactggtgttcggcgtcaagtgtaacgggaatatcttctttgtggtcctgttgacgctgttgcaaggtctgtgcggaatgtgcttcggcttcgtaatctcagccgcttgtgagctggaaagaaacgcgatccagctagcactcggctcattctaccccacgcttctgctgagcggggtgatctggcccatcgagggcatgccgtggatcctgcgctacatctccacgtgtctgccgctgaccctcgccacgtcctctctgcggtctatcctgacccgcggctggcccatcaccgaccccgaggtctacatgggcttcatctccaccctcatctggatcgctctgttcctcgtagtcaccatcacagttctaaggttcaagaaagga

SEQ ID NO: 82 - DNA, 7800 bp, Plutella xylostella
  misc_feature (1)..(7800): Dumpy
cgacccgtgcacccgtgcgttggcgcttgtggtacaaatgctaaatgcagtgtggtcaaccacaatgccttatgcagctgtcccaataattacgccggtgatcctttcgtacattgcgctgtcgcagatagaccacaaccaaaacctagtggtaacccatgtgtgccctcaccatgcggtccaaactcacagtgtagagttatcggagagactccagcttgctcatgtgaacctggctacgtgggacgagcgcccaactgccgacctgaatgtatctatgacggagaatgcccgagcaacctagcgtgtgtccgcgagaagtgtatcaacccttgtgatggatcttgcggatcaaataccgattgtgtagtcataaatcacaaagccgcttgtcattgccgtgaaggctacactggtgatccttttagaggttgccgatttttaataacggtagccgtcgaagaagaagtaaacccgtgcaatccttcaccttgtggaccaaatgctatatgcactgagaagtattcggcaggagcgtgcacgtgtgaaccaggatactttggtgacccgtacctcggttgtagaccagaatgtgttacaaataacgattgcccgacagacaaagcatgctccaacaataaatgcgtaaatccatgtcaaagtgcttgtggcataaacgcacaatgccacgtggctcaccatactcctgtttgtttatgcattgatggatacgaaggaaatcctgtagtatcatgccacccgcaacgatcaccaccactcgctgataccaatccatgtgtgccttcaccgtgcggaccgtatagtacttgcaaagtgttggaaggtcacggagtgtgctcgtgccagcaaggctacggctacgtgggctcgccgcccatgtgccggcccgagtgcgtgatcagcacggactgcccgcagcaccaggcgtgcatgaaccagaagtgcaaagacccgtgcccgggaacttgcggcgtaaacgcccgatgccaagtcattaatcataatcctatttgcacttgcaagccaggattctctggtgatccgttcgttacatgccgcgtacagcaaaaacctatctttgagggacctaagggaaatccatgcataccttcaccatgtggtccatattctcaatgtaaattagttggagaagcgcctgcatgttcttgcttaccaaactatattggtattgcaccaaactgtagaccggaatgttccatcaacgcggagtgtcccggtaaccttgcatgtcagaatgagaaatgtgtagatccgtgtccggggtcatgtggtttcaacgcggaatgctctgtaggaaatcatgttgctctttgtaattgtttgcccggacatactggagatcctttcagcggatgttcaagaattgaatatgtctccgaaccgccaccaaacccatgcaacccctcgccttgcggagcaaacgctcagtgtaaagaaagaaatggagttggatcatgttcttgtttgcctgaatatttcggagatccttacacaggctgcaggcccgaatgtgtgtccaactctgattgcgacagaaataaggcttgttcgaacaaccgatgcaaggacccttgcccaggggcttgtggcattaatgctgaatgtagaactgttaaccattcaccaacttgctcgtgtctcaacggctacagtggaaacccattggtccgatgtgaaatcgaccgaattccaccaagagaagaaacagtacttgattcctgtcagccatctccctgcggtccaaatagtctttgtcgagccgtcaacggccacagtgtgtgctcttgtgagagtggattcattgggactccgccatcttgtcgaccggaatgtatcgtcagctcagagtgtccacaaaacaaagcgtgcgtcaacaagaaatgcattgacccatgtccgaatacatgtggtcttaacgcccgatgccaagttattacacacaatcccatatgcagctgcacacctggtttcaccggggatccgttcacaagatgttcaccagaagaaaaaatggtacaaacaaacccttgcgttccttctccatgtggaccgaactcggaatgccgtgtaattggcgaccaagcagcttgctcttgtatgccgaactacatcggccgagttccgaactgcaggccagaatgtacaattgacgctgaatgcccaagtaatgctgcttgcataaatgaacgatgcaaagacccttgccaaggtggatgcggactcaatgctttgtgtctgaccgtcaatcacagacctatttgtagttgccagcaaggatttacaggagatgcatcgagtaattgtgtccagatggtgatatcatccactgaggtgacaccaacatctagtccttgcacgccgtcaccgtgtggaccaaacgcagaaggccgagaacacaacggagccggcgcctgcttctgctcggaggcctacgagggagacccgtacagtccccagggatgtcgcagggaatgtgagaacaacgacgagtgtgcgccgaacttggcatgcacccgcttcaagtgcatagacccatgcccgaggacttgcggccaaatggctcagtgtactgttgaaaatcatgtgcctgtgtgcagttgcccacgtggctactctggagatccattcttccaatgcagggaaatcgtattagattctacaccaccacaaaacccatgcgagcctaccccttgtggaccgaatagtcaatgcagacaagtgaacatgcaagccgtatgttcatgtctgccgaactacgttggatcaccgccaggatgcagacctgaatgtgttgtgaacagcgaatgtgatacttctaaggcttgcatcaatcagaaatgtgatgacccatgtccgaacacttgtggactgagagcacattgccttgtgaagaaccataatccaatatgtacttgccctctgggaatgacaggcgatccatttactcaatgctattcgataccagtcacaactgagagacctccttcatgtaatccgtccccatgtggccctcactctcgctgtcagttgttggctagcggaccggcttgctcctgcctgccaggatatgtgggctccccaccatcctgcagaccggaatgtacaatcaactctgaatgtccagcgtcactggcgtgtgtacgacagaaatgcgaagatccatgccctggctcatgcggtattgatgccagctgccatgttttgaatcatgttgcagtttgcgtatgcaatgaaggttacagtggtgatccattctccagatgctcaccggttttggcagcaccaactacacctgaaccaactgacccatgcaatccatcgccttgtggaccaaatgctcaatgtgataatggcttctgcacttgtttgccggagtacaatggaaatccatatgaatcctgcagaccggaatgtacgggaagtcaagaatgtcccagagataaggcttgcttcagaaacaaatgccgtgacccatgtccaggcgtgtgtggacaaaacgccaaatgtgacgtcatcaatcacataccaacatgctcgtgtatttctgattacactggagatccgtttactcattgtcatccaatggaagaagttaaacaacaaccaagagatccttgtcacccatcaccttgcggacctaacagcgtgtgcagaaatgttgataatactggtgtgtgtgcttgtatggaaggattccaaggctctccaccagcttgtagaccagaatgtgttgttagctcagagtgtccatcagttaaggcctgcgtcaatcagaagtgcataaacccatgcatcaatgcatgcggctcatcagcaaggtgtgaggttataaaccacagccccatttgcagttgcaatgcaggacaaacgggtgatccattcaagagttgctacgacatagtggcgtcaccaccagatccagtagacgcttgtaacccctctccgtgtggccctaatgcggaatgtttagacagaaatggaaaagctaactgcaaatgtattgatacttacataggacaacctccaaactgtcgacctgaatgtgtcattaatcctgattgcccatcgaaccaggcatgtatacgaaacagatgtgtagacccgtgtccaggctcctgtggagttaacgctgactgtcttgtcatcagtcacacggtttcgtgcagttgcaaggaaaagtacactgggaatccatttttacaatgtgtcccacaagaagataaagtagtccaaccttgtgatccatcaccgtgtggagcgaacgcagtatgcacgcaacgcgacggcgcgggtgcttgctcctgcctggaaggctaccaaggaaacccgtatgacggctgtcggccagagtgcgtgctcagctcagactgttcggcagacaaatcctgcattaggaacaagtgcgctgacccttgcccaggagtgtgcggatctaacgcagaatgttcggtcatcaaccacgtgccatcgtgcgcttgcataaagggattctcaggaaatccattcgtacaatgctcgagggatgaaataccagagctgaccagaccctgccaaccatcgccctgtggacctaacagtatctgtagagagaacggcggcttagcctcatgtgaatgtcttcccgattaccgaggagcgccacctgactgccgaccagaatgcacggttaacagcgagtgtcctacagaccgagcttgtcatagactgaagtgcgctgatccttgccgaggtacttgtggtataggagcgcattgtcaagtggtcaatcacagtcctctctgtagttgcccagctggctacagcggagatccatttacaagatgtgttgagataccaagatcagaaccgccgattgaaactccgctgcaaccatgccagcctaacccatgcggaccgtacagtgagtgtcgaccactcaacggaaatccgtcctgttcttgctcgcagggctacatgggcgctccaccaaattgccacccagaatgtcttgtaaacactgactgcccctcacatcaagcttgtattgctgagaaatgtacaaacccttgcgaaggttcgtgtggattcagggctgaatgtcgtgttcatgatcacatacctatatgcagctgtccttcaagttattctggcgatccattcattcagtgctccgaagttattataacgccaacacaatcacctgacccttgcgccctgtcgccttgtggaagcaacgctctatgcgatgacggccaatgctcttgcgcgccagggtacttcggtgatccgtacttcggttgccgattggaatgcagcacgaacggcgaatgttctccgactaagacctgtcaaggaggcaagtgtgtggacccgtgtccgggagcgtgcggcaccagcgccgtgtgcgccgtcaacaaccacatcccgtcctgcacgtgtccgcccggcacgtctggcgatccatttaacttctgcgccgaagttgttgtcaaggatatacaattacagacatcggcttgctctccatcaccttgtggtccatacagtgaatgctcagtgagcggtaacggagcggcggcgtgctcgtgccgcgccggccacatcggctccccgcccaactgccgacccgagtgtctggtcagtgccgagtgtaagctgcagcacgcgtgcatagagcgccgctgcagagacccgtgcgagggagcttgcggacgaggcgccaggtgccacgtcatagcgcactcaccgatctgtacctgcaatgacggatacacaggcgatccattcacttactgctacccagctccagctccaccatcacaacctatagacccgtgccaaccgtccccctgtggaccgaactcgatatgtgtgaacacgggtgagatcccggcgtgcagttgccagccgggctaccgcggggcgccgcccaactgccggccggagtgcaccatcagcgcggagtgcggcggcgcgctggcgtgcgtgaacctgcgctgccgcgacccgtgcgcgcaggcgtgcgggccgcgcgccacgtgcgccgtggtggaccaccgcgccgtctgcgcctgtccgcccggactagagggcgaccccttccagggttgctctcccgccaaggagattccaccaccgaatgacccttgcaatccttcgccttgcggacctggcgctatatgccgcacccgcggcgccggcgcgtcgtgcgagtgcgagccggggctgcgcggggacccctactccggctgccggcccgagtgcctcgccgactccgactgccccaccaccagagcctgcatcaggtctcactgcaaggatccttgccagggaacttgcggcattggagccgactgcgagactgtcaaccatattccactttgctcttgtccgcaaggaacaagaggaaatgctttcgaaagatgtgacgtaataatgcaagcacccccctgcacgccgtccccgtgcggcccgggcgcgctgtgcacggtgtcgggcgactcggccgtgtgctcgtgcccggccggcaccgcgggcgacgcggccgcggccggctgccggcccgagtgcgtcgtcagctccgagtgcccgcgcgaccgcgcctgcgtgcgcaacaagtgcatcgacccctgcgtcggcgcttgcggcaacaacgcgctctgcagggtgttcgaccatgcgccgatatgctcgtgcccaccggcccttaccggggatccgttcttggactgtagacctaaagaaaaatcaccacctgttacatacgacccgtgcgagcccaacccttgcggacctcacggcacttgccgcgacggcttctgcagctacccggagtgtgtcgtgaacgacgactgccccggcgaccgcgcctgcatcaaccgcaagtgcgctgacccctgcgtcggcgcctgcggcctcaacgccatctgcactggagtcaggcatacagccgtgtgctcctgtccagccggcttcacaggctcgccgtttgtcggctgtgagaggatcaccatctctacaccacctccagctgttcccgaatgtgttggtgatgatcaatgtgcggacaacgcggcgtgtatagactcgcgctgcatcacgctgtgctcgcccggcaactgcggctacaacgcgcgctgcctcgcgcggcaacaccgggagcggtgcgcctgcatgccaggctttgagggagacgcttacactggatgttactcagtgcaatgccacagcaacaacgactgcccagacgacgagagctgcgagggcggttcatgcgtgaaggtttgctcacgcgtgcgatgcggaacccaagcacattgcgtcgcgcgcggccacacggcctcctgcgcgtgcgacacgggcgcccgcggcgacccctggaccggctgccggcgcgaggagtgtactgtcgacgacgactgccccgccgcgctggcgtgccgccggggcagctgccaggacccctgccccggcgcctgcgcgcgggacgccgtctgctccgtcgtacgacacaaacccatctgtgaatgccccagaggaacggagggcaacccgaagaccgaatgtagaagaatagtaatggacacggtagagtgcgtgatggacgcggagtgcgggccggagctggcgtgcctgcagggccggtgccgcgacccgtgcgacgcgagctcctgcggcgtgcgcgccgtgtgccgcgtggccaacacgctgcccttcaggacgctagtgtgcgagtgccctaaaccactcaccggcgacgcctccgtacaatgtaaccca

SEQ ID NO: 83 - DNA, 1158 bp, Spodoptera frugiperda
  misc_feature (1)..(1158): AK (arginine kinase)
atgaattataaactgaaagtcacaattcctgtggtggtttgcggtggtgccgttctcgcgtattacctcatcaggcgaaaagccgcagcaatggtggacgccgcaaccatcgagaagttggaggctggtttcagcaagctccaggcctctgactccaagtcactgctgaagaagtaccttaccaaggaggtattcgacgctcttaagaacaagaagacctccttcggctcaactcttctggattgcatccagtctggtgttgagaacttggactctggtgtcggaatctacgcccccgacgctgaggcgtacacagtgttcgccgacctgttcgaccccatcatcgaggattaccacaatggcttcaagaaaaccgacaagcaccctgccaagaactggggtgatgttgagaccctcggcaacttggaccctgccggcgagttcgttgtctccacccgtgtgcgctgtggtcgctccatggagggctaccccttcaacccctgcttgaccgaggcccagtacaaggagatggaagagaaggttgccagcactctctctggactcgagggagaactcaagggtactttctaccccttgactggtatgtccaaggagacccagcagcaactcatcgatgaccacttcctgttcaaggagggtgaccgtttcctccaggctgccaacgcttgccgcttctggccctctggccgtggtatctaccacaacgagaacaagaccttcttggtatggtgcaatgaggaggaccatctccgtcttatctccatgcagatgggtggtgacctgaagcaggtgtacaagaggctggtgaccgctgtcaacgacattgagaagcgcattcctttctcccacgatgacaggcttggtttcctcactttctgccccaccaacttgggaacaactgttcgtgcctcagtgcacatcaagctgcccaagctggctgccgacaaggcgaagctggaggagatcgcttccaagtaccacctgcaggtgcgcggtacccgcggcgagcacactgaggctgagggtggagtctacgacatctccaacaagaggcgcatgggactcaccgagtacgacgccgtcaaggagatgtacgatggcatcgctgaactgatcaaaattgagaagacactgtaa

SEQ ID NO: 84 - DNA, 2259 bp, Spodoptera frugiperda
  misc_feature (1)..(2259): VHDL (very high density lipoprotein)
atgagggctgtcgtattattggtggtgtgcctggccggcctggccatggctagacgtgataccgacgactatacaacgaataacttcgtgacaatggacatcaagcaacggcaaatggtgatcttgaagttgttgaaccacgtgatggaacccctgatgtacaaggacctggaagacatcggcaaaaaccacaagttcgaggacaccttcgaccgttacactaaaaccgatgtcgtgaaagacttccttaaaatgctgaaggttggtttcctgcctcgtggtgagatcttcactctccacattgaccgccagctcaaagaagtagtcaacatgttccacatgctgtactacgctaaggacttcgacaccttcgtcagaaccgcctgctggatgcgcctgtacctcaacgaaggcatgttcgtatacgctctaaccgtggctgtcagacaccgtgaggactgcagaggtatcatcctgcctcctccctatgaaatctacccatactatttcgtacgtggtgatgtcatccagaaagcttacctaatgaaaatgaagagaggacttttggacctgaaactttgcgacttctacggaatcaagaagaccgacaaagacatctacatcatcgatgaaaacgtgtatgacaaacgcgtctacctcaaccatgacgacaaactccgctacttcactgaagatattgacctgaacacttactactactacttccacgtagactatccattctggatgaaggacaagttcatggacaagacgaagacaaggcgtttcgagctcacagtatacatgtaccaacagatcttggcccgatactacctggagcgtctttccaatggattaggtaggattaaggacttgtcctggtacaaacctatcaagaagggatactggccttggttgaaactgcacaatggcattgaattccctgtgagattcaacaactacgtgattgctcgtgaccacaaccttgacgtcatccgtctgtgtgacgagtatgagaagattattagggaggctatcatcaagggattcattgaaattaacggcatgagactggaactgaccaagactgaagatatggaagtcctcggaaaactgatctatggcaacattgaaaaggttgacgttgataagacctatgtagactcataccgttacctgctgatagtcatgaaggctgctattggtcttaacactttctattctgacaagtacttcgtcgttcctaccatcctcgacacataccagacggctcttcgtgacccagtattctacatgctacagaaacgcatcatcgatttggtgtgcttgtacaaactgcgtctgcctagctacaccaaggaggacctctacttccccggtgtcaagatcgacaacgtgaacgttgacaagcttgttacttacttcgatgactacctgatggacatgaccaacgctgtatacctgactgaagatgaactcaagaagaccaaatccgacatgaaattcttcgtccgcaaacgccgcctcaatcaccagccattcaaggttaccctagacatcttgtctgacaaatcagtcgactgtgtcgtcagagtgttccttggacctaagaaggaccacatgggccgtctcattgacatcaacatcaaccgtcttaacttcgttgaattagacaccttcctatacaaactgaccactggcaagaacacgatcgtcaggaactcttatgacatgcacaacttggtccgtgaccgcatcatgacccgtgacttatggaagaaggttgagtccatcactgacatgagggacttcctcgttaaggacttgaggaactaccacactggtttcccgaccaggcttctgcttcctaaaggtttcgttggtggtatgcacatgatgctctacgtcatcgtcactccattgaaacttgttgacaacgttgacttgaatgtcttggacgtgaaccgcaaggacttcatgtatgacttcaggtctactgtcctactggacaagatgcctcttggcttccccttcgaccgtcgcattgatgttggcaacttcttcacacctaacatgaagttcgttgatgtcacaatcttccacaagaagcagacttgtgacatgaagaccagatggaaccgctatgtgctgaagaactacaacctggtagaccgaacccctattgagtcggacacgtacttcgtggacaccgacctcaacatgaaggttgaccgcaaccgtaacctcttcgacatataa

SEQ ID NO: 85 - DNA, 1377 bp, Plutella xylostella
  misc_feature (1)..(1377): AK (arginine kinase)
tgtgttttatttctgtgcattttactcagtgcggcgagttttaatctggagcccaggattcctgtgataaagtttgggagatccggctcgtactttggattttctgtagcggaacaccagaccatcacggattcatcttcgactagttggttgctaataggcgctccgctggaccagaaccggcagccgaacaccacgcgctcgggcgcgctgtggaagtgcccgctgacgcccgccgtccgggactgtctgcaggtcgtcactgatggcaagctgacggaattcggcaaattagacacgaggatcgactcggagcacctgtcggcgccgcacccctacgagatcaagacgggccagtggctgggcgtgtccgtgcggagtcaggggccggggaggaaggccgtcgtctgtgcacacaggtacatccgcaagtctggcgagtcccagtacgggcaggggctgtgctacacgctgagcaacgagctcgagctggccgaggtgtgggagccctgcaggggacggccagtgcaacgagagcatgaagagtacggcttctgccaggcgggcacgagcagcgctttgctaccagacgacacgctgctgctgggcagccccggcccctacacgtggcgcggcaccgtgttccgacaagacgccaaggaggacctgctggagagggactccgtggtctacatggcgccggtggaagacgggttcagtcccgttgagaagtatagttatttggggatgtcagtagccggcgccagtttcttcaaagaagagttctcgtacgcagcgggagcgccccgctcgcgcggcacggggcaggtcatcatcttcaacaagcgccccaactccgactggaccaacccctacgccaacatcctgctcaacgtcagcctcatcatcagcggggagcagttcggctctagttttgggtatgagatcgccgctgctgatgttaatggagatgggatacctgacctcctcgttggcgctccattctacttctcccgagacgctggaggagccgtttacttatacatcaacgaagatcaccatctcagccaaacctacagtctgaagctgacgggaaaaccggagtctcagttcggaatctcaatagccaatgctggggacctgaacaaagacggctgtgaagacgttgctattggaagcccatacgaaggcaatggagttgtttacatccatctgggcaacagaaaaactggcttaagtcccaaagctgatcaagtgattgcagctgaatctttgcccagagttttgaagacttttggctactctttatcgggtggtgttgatcttgacgctaacgggtatccagatttgttggttggggcttatgaaaatagcagc

SEQ ID NO: 86 - DNA, 1458 bp, Plutella xylostella
  misc_feature (1)..(1458): VHDL (very high density lipoprotein)
cttgcccgacactacttggagcgcctttcgaacggcctcggcgagatcacgactctgtcctggaacaaacccatcaagaagggattcgtgccctggatggcgctgcacaacggtgtccagctccccatgaggtggaacaaccacgtcatcgtccgtgaggacaacgtcgatgtcgtccgcctagtcgaagactacgagatgatcatcaaggaagctatcatcaagggatacatcgagatcaacaatgtcaagtttgaacttatcaagcccgaggatgtcgaatacctgggcagattaatctacggaaagattgagaagaccgatcttgacaagactcgcttcgatgcttaccgctaccttctcatcatcatgaaatccgccattggcctcaacacgatgaagtcagacaagtacttcgtgatgccaacactcctcgacagctaccagaccgctctccgtgaccctgtcttctggcgtcttcaaaagaggatcgtcgacttcttgattctgttcaagaggcgtctgccttactacacaagggaggaactgcaattccaaggagtgaagattgagaaggttgtcgttgacaaacttatcacatacttcgatgactacttcatggacatgactaacgccgttatgctaaccgacgaagagttgaagaaaaccacttccgacatgacattcttggttcgcaagcgccgcctcaatcacgaaccgttcaaagtaactctcgatgtttactcagacaaggccaccgactgtgttgtgagaattttcctgggaccgaagaaggatgttcacggacgtctgatcgacttcaacaggaaccgtctcaactttgtggagctggacactttcgtgtacaaactggacaccggcaagaacaccatcgtcagggactctgtggacatgcacaacttggtgcgtgaccgcgtcatgacccacgacttctggaagaagctcgaccacgccagtgacatcaagcagctgtacatcaaggacctcaggaactacaacaccggcttcccgaccagactgctcctgcccaagggtcgcgtgggaggtatggagatgatgctctactgcatcgtgtctccgctgaagatcgtcgagaacgtcgaccagactctgatcagagacaccacccgcaaggacttcctggtgaacttcaggtccactgtgttgctggacaagatgccgctcggcttcccgctggaccggttcgtggacgtgtcccggttcttcaccagcaacatgaagctggtcgacgtggtggtgtaccacaagaagaaggtgtgcgacatgaagagccgctgggagaagttcgtgctgagggactacaacatggtggaccggacgcccatcgacgccggcacttacttcaccgacttcgtggaggtggacaccgacatccgccgcaaggaccgcttccgcgacgacagcctcgagcatctg

SEQ ID NO: 87 - DNA, 192 bp, Spodoptera frugiperda
  misc_feature (1)..(192): diuretic hormone 31
atggagttgttagtccacctcagtgcagtattcgggaggtttattctaaacttagtgggcatctcgtcgcctccttccggggcctccggcgtagttggctgctgccagtcccatgaggtgcttggcttgaagggcgccagagtatccacggctcaggccaagatcaagggctcgcttctcgctggaatttga

SEQ ID NO: 88 - DNA, 450 bp, Plutella xylostella
  misc_feature (1)..(450): diuretic hormone 31
ccgtcggtcaacgcccctgccgccgtgtccaatcacttctccaccatcacgtacgcccgaggcgccgccgtcctccgcatgacgcagcagttactgggagagaacacctacctgaccggtttgaggaactatctgaaggatagagcattcgacgtatcggagccgcgtcacctattctcggccctggacacagtggccgccgctgacagcgccctagcgacgtacgggggagtcaccatcgagtcttacctcaagtcctggtcggagcaggcgggacacccgctgctgactgtcgtggtcaaccacgataccggactgatgcaagttacacaggctcgatgggagcgcaacaccggtgtgtcgggtgtgccgaccctgtaccagatacccatcacgtggacccgcggcggcgcgcccaacttcatcaacctgaaaccctcccaggtcctg

SEQ ID NO: 89 - DNA, 3190 bp, Spodoptera frugiperda
  misc_feature (1)..(3190): pre-mRNA splicing factor
atcagtagcatatcaaaggttagcttgggaggctttgaaaaagtcgatacacggccacatcaacaaaatcaacgtcggcaatattggcattatcataaaagagttattgaaagagaacatagttcgtggaagaggtttgttgtgccggtctgtgatacaggcacaggctgcttctcctacattcaccaatgtgtacgctgcactggttgctgccgtcaactctcgcttccctaacatcggagagttgcttctaaagaggttgatgatccaattcaaaagaggtttcaaacgtaatgataaacctatatgtatatcttcagcttcattcatagctcacttggtaaaccagagagtagcacatgagatacttgcattggagttactaactttgttggtagagactcctactgatgattcagttgaggtggccattgctttcctgaaggaatgtggacagaaactgactgaagtgtcttccaagggtgtgaatgcaatatttgaaatgttaaggaatattcttcatgaaggccaattggataagagggtacagtacatgatagaagtcatgtttcaagtgtggaaggatgggttcaaagaccatccggctcttattgaggagttggagctggtgcctgaggaggagcagttcactcacctcatgatgctggatgaagccacagacccacaggatatcctgaatgttttcaagtttgatgacaagtatgaagaaaatgaacaaaagtataaaacactgagcaaagagattctcggctctgatgctgagtctggagaggaggatggctccggagagagtggcagtgaggaatcagaggaagatgaagatgaagagggacaaaaaccagtcactattattgataacacagaaacaaaccttgtggctctgcgtaggactatatacctgactatcaactctagtttagacttcgaggagtgtgcccataagctgatgaagatgcaactgaagccaggccaagaagtagaactctgtcacatgttcctggactgctgtgcagagcagaggacttacgagaagttctatggactcctagcacaacggttttgtaacataaataggatatacattggtcctttcgaggaaatattcaaagattcctatggaacagcccacagattggacacaaataggttaaggaatgttagcaagttctttgcacatttattgtttacggattcaatcagttgggaggtattggaatgtgtgaagctaaatgaggaggacacaaccagttctagtcgtatttatatcaagattttgttccaagaattggcagagtatatgggactgaagaaactgaatgatcgcctgaaggacccaaccttgcagactgcattctccggtatttttcctcgtgataaccccaagaatacgagattctccatcaacttcttcacttccattggtctcggtggcttgacggatgagctgagagagcatttgaaacaactccctaagaatgtgcccgctccaataccagatataacactgggcagtgactccagctcagattccagttccgactcgtctagttccagtagctcagactcctcgtcatccagtgacagttccagtgaatccgagtcagagaaaaccagtaaaaagaagaaagaaaagaagtctaaaaaggataaaggcaaagataaagcacctaaaacgcctgaaccggaacccgaaccacctgttgaaaggtggggacatgatggattttacgacacctacggaaaagatgctaagagaatggaaaatagaaatgatcgtcaagatagagataacttcacgagacctcgggacgctaggagaaatgatgatagaatggatcatagaaatggagagaatagaagagatcagagaaggaggtatgatgggaatgaacaaaatgatcgcgacagcaggcaacgtagagaggacgatagaagatatcaggatgatgacagacgtagagagaatgagagaagccgtaaagatgatgataagggacgaaaagatgatagtaatgatagaccacgaagagaggagaaaaactacgatgatagagtgcgtggagatgaggatgaagctcccagaaagagtagaaaagacaaacaaaatagagatgatgagtcaagaagtagaaagaaagatttagcagaacaagacgaaacgaatcttagagaagatacaagaaaaaaggataaacgtaacgatagacaaaaagacaatcgcgatgaagacgaatctaggactaaaagaaaagataacagccaaagataccaaaatggagaccaacaatttgaagataaaattaaaaatattaaagatgaaagtgtagaacatagatcaaagaaaaaagaaaataagaagaaagataaaggtagtaaaagacatgaggacagtagtagtgaagaggaaatacctgagaaaagaagtaaaaagaaacaatcaaaagataaaaagaagaagcaagtgagtgagtctgaagattcctcatcctcatcatcctctgattcatcgtcaacatcctcaacgtcctccagctcgtcatcatcatcatcagacgatgaaaatgataagaaggcttcactgaagccacagctgtcagctccatcgtacttacatcacttgcgagaaaatgaatcccctcccttcttgaaaccgcaagtagagccacgcccacatattctggtaggcaccatcatgaatgaggatgaagctgtcgccatgatcgcagctgctgatgcagataaagagaatgggctcaagaagtttataggtaattttctaatagaaaagaatatagtacacaactacgctataggcgagaagaatttcttaatgagtctcatattggaagtcattgattactcggcgcagcgcgacttcgatgcgttcagattagctgcgctcatcacgatatacatcgacacgcatctctacttcaggtggtattactggcagtccccgacagcggtctggaattacttcaagcaagttatgataaggcatactattgaagataccccggacggcgaggaagtgttcaggcctcaagactgttacgatatcatcacacatttccactcggtgtacctggctaacatgccactgatacacataatcacattcggcaccaatagattgaaactgatatggcctttcaagttagggaaatag

SEQ ID NO: 90 - DNA, 600 bp, Spodoptera frugiperda
  misc_feature (1)..(600): PRGP-LE
atggccaatttaattcaaattttcatcgcctgcgcttgcgtgctagctgtttcagcaattccttatggaaaatctcgcaacgcttactcataccccttcaactacgtgtgccgggaatcatggggagctagaccgccaaatggttcgacccctctatctctgccggtcccattcgtggtagtccaccatagctacatcccccctgactgcgacaccgaggacgcttgcaagcataacatgaggctcatgcaagatatgcatcagattcagaatggatggcaggatattggatacaatttcgcagtgggcggcgaaggttcagtttacgaaggtcggggctgggaatccgttggagctcatgctgtgtcttacaatgttaagagcatcggcatttgtatgattggagacttcgttgaaaaacttcccccacaatctcaactggaatcgctacagaaactaattgcgactggagtggagcttggctacatcagtcgagactacaaactgatcggtcaccgacaggtctcagccactgagtgtccaggacaagcactcttcaacgagatctccacctgggaccatttcacaccagccctataa

SEQ ID NO: 91 - DNA, 2265 bp, Spodoptera frugiperda
  misc_feature (1)..(2265): COP I gamma
atgactggcaaggaagacttgtatagagctgctgccattcgcgccttatgcacaattactgacagcacaatgttacaagcaattgagcgctacatgaaacaagccattgtagacacgaaccctgcagtgagctctgctgctctggtgtctgctcttcacttatcggctacagtacctgacctagtacgacgttgggtgatggaagcacagggtgtcatcacatcagataatgcaatggtgtcataccatgctctagcagtagttgcaggagctcgtcgcaatgatcgcctttccacagtgaaacttgttacaaaactagctcggacaccactccgttcatcttatgcaatttgccttttgattcgttatgcagcaaaattagctgaagaggaccaaactgatgcttcagaaccttatgtggaattcattgaatcctgcttgcgtcataagtctgagattgtagtttatgaagctgcacatgcgattgtcaatttgaggaagtctgctcgtgatcttgctcaagctgtttctgtcctacaaatattttgtggttcttccaaggcaacaatgcgtctagcaggcgcgcgcactttagctaaactaacagccaaacatcctaatgcagtagcagcctgtgctgttgacttggaaaatttaatttcggatccaaaccgctcagttgccacactagctgtgactactcttctagctacaggagcggaaagttctattgatcgtttaatgaaacagatatccagcttcatgtcagagatttcagatgaattcaaaattgtagtagtgcgtgcaatcaggcgcttgtgctccaagtatccacgtaaacatcaatcacttgcatcgtttctggctggtatgcttcgtgatgaaggaggactgcagtataaaactgctattgctgatgcaattattgctcttgtggaagaaaatcccgatgcaaaagagacaggcttggcacacctttgtgaatttattgaagactgtgagcatgcgtcgttagctgtgcgcatattgcatattttgggtcgtgaaggaccaaaagctcgtcagccatccagatatattcgatacatatataatagagtgattttggagtctggtcctgtgcgtgctgccgctgtttctgctgttgctcgttttggagctgctcgcccagaattgcttcccaatataagcgtacttttggctagatgtcaattagatgatgatgatgaggtacgtgatcgtgctatatattatagcgcaattttggattctggtgatgctcaactcatcaatgattatatcatcaatgtgccgatacctaatcctgttctcctagaaagagcattacaggattatcttaattctgatgctgatttgtccgaaccttttaatttggccacagtccctactatggctgaggagacacaagagcctaaggaagctccagttgaaatcgaatcacgagcaccgattgtttctcgcgaagaacaatatgctgatcaaataaaagtcattcctggcattgaaaaacttggaccaatattcaaaacatgtgagtctattgacttgactgaaccagaaaccgagtaccgcgtccaatgcgtaaaacatattttcgctcgccatttagtcttacaatttgaatgtttgaacacattgagcgatcaacttctggaaaaagttcatatacggttagaagctgcccctggttacaaaatgctaattgaagttccttgcgaacaattgccttatgacaaacaaggcagtgtattctgtgtccttgaatttcctgaaaatccgattgaaactttgggaacctttggcgcaacattggaatttgttgttcgtgattgcgatcctacaactggcttaccagattcaggagaaggatatgccgatacttatccattagaagaaatagaagtgagttgcgctgaacaattcaggacgcgcgcagcttccgacgactgggaagcaacttgggaaagggctgcttctgcagaagaagcttgtgacactttcggtctatctcagtccgacgtaggggaagctgctaaagccgtatgtgaacatttaggactgccgaagggcgccatctcaggagacgcagtgaaagaaatccgcggtggtggagtttggcgcggtggaacaccggtactcgtcagagctcggctggtcatggctggaggcgcggttactatgcaattaacagcccgctcgcctcgcgaagatattgccactttattgttggctgccgttggttag

SEQ ID NO: 92 - DNA, 537 bp, Spodoptera frugiperda
  misc_feature (1)..(537): COP I zeta
atggttcacacaacaatggagggatctctttttgagccgaccctatacatagtgaaaggcatgtgtatcctggacaacgatggcaacaggatcctcgccaagtattatgataaagacattatgccgacagccaaggagcagaaggcatttgagaagaatttgttcaacaagacacacagagcaaacgccgagattattatgcttgaaggtctaacctgtgtatacaagagcaatgtggatctattcttctatgtgatgggcagctcacacgagaatgagctaatcctccaatcagtattgaacaccctgtacgagtcagtcagtattctactgaggaggaacgtcgagaggagagtgctgctggacaacctggacgctgtgatgctggccttcgatgagatctgtgatggcggagtgattctggacaccgacccaacatcgatagtcggacgcgcagcactacggaccgaagatgtgccgctaggcgagcaaaccgttgcacaggtaatggaacaagtcaataaaatgttctggtag

SEQ ID NO: 93 - DNA, 1404 bp, Spodoptera frugiperda
  misc_feature (1)..(1404): COP I beta prime
atgttccgacagccgttgcgcctggatatcaagaggaagttgacagcgaggtcggaccgcgtcaagtgcgtggaccagcacccgacggagccatggctcctgtgctccctatacaacggtgacgtgaacatatggaactatgaaacacattcgcagatcaagagattcgaggtatgcgacctaccggtgcgcgccgctaagttcgtgcctcgcaagaactgggtgattactggctccgatgacatgcagattcgcgtgttcaactacaacacgctcgagagagtgcacgcctttgaggcgcattctgactacgtcaggtgcatcgcgatacatcccacacagccatacatcctcaccagcagcgatgacctattgatcaagctgtggaactgggaacgcaactgggcatgccagcaagtgttcgagggccacacacattatgtgatgcagatcgtcatcaaccctaaagacaacaacacattcgctagtgctagtctcgacaccaccgtcaaagtatggcagcttggctcttcaatttccaacttcacattagaaggccacgagaaaggcgtaaactgcgtcgactactaccacggcggcgacaagccttacctcataagtggtgccgacgatcgtctcgtcaaaatatgggactaccagaataaaacatgtgtccagacattggagagtcacacgcagaatgtgacagccgtgtcgttccacccggagctgccgatcctgatgactggctcagaggacggcaccatcagaatatggcacgcgggcacttacagacttgaatcctcgctcaactatggcttcgagagagtctggaccatttcctccatgcacggctctaacaacgtagctattggttacgacgagggcacgatcatgatcaaggtgggccgcgaggagccggccatttccatggacgtcaatggaggcaagattatttgggcgaagcattctgagatgcagcaagtcaacctgaaggcgttgccagaaggcacagagataaaagatggggagcgggttccagtgatggcgaaggacatgggatcctgtgagatttatccacaaactatagcacacaacccgaacggtcggttcgtggtagtgtgcggggacggcgagtacattatttacacggccatggcacttaggaacaaggcgttcggcactgcacaggagttcgtctgggcgtttgatagctcagagtatgcgacacttgagaactccagcaccatcaaggtgttcaagaacttcaaagagagaaagagtttcaagcctgagtatggtgctgaaggaatatacggcggtttcatgttgggcgtgaagtccatcagcggtgtggcgttctccttctatgattgggagaacttggagttgatcagacggtga

SEQ ID NO: 94 - DNA, 786 bp, Spodoptera frugiperda
  misc_feature (1)..(786): COP I alpha
atgtgtgcacaattccacccgacagaagaccttctggtttccgcttctttggaccaatctgttagagtttgggacttctcaggtcttagaaagaagagtgtagctccaggacccacagggcttgctgaacatttgaggaacccgcaggctacggacctatttggacaggcggacgctgtcgtcaaacacgtgctggagggccacgaccgaggagtgaattgggcctccttccacccaagcctgccgcttatagtgtcggccgccgacgaccgacaggtcaaactctggaggatgaacgatgccaaggcctgggaggtggacacgtgccgcggccactacaacaacgtctcctgcgtgctgttccacgccaggcacgagctgatcctctccaacagcgaggacaagttcatcagggtctgggacatgaccaagaggacttgcctacactccttccggagggaacatgagagatactgggtactagctgcccacccgacattgaatttattcgccgcgggccacgatgcgggtatggtgctgttcaagctgcagagagagaggcctgcctacgccgtgcataataacatgcttttctatatcaaggacagacaactgcgcaagttggatatggcgaccaatcgcgacgcgcccgtgatgcagatcaaaggaggcggccgcaaccaaccttacaggtaccttagaaaacaacaatattataaaataaaaataactacggaatgcaaatctcgtgagattggggctcatgcgagatcacgcgagatgtaa

SEQ ID NO: 95 - DNA, 384 bp, Spodoptera frugiperda
  misc_feature (1)..(384): COP I delta
atgctgctcatcacaaccaaagccagtaacatcctcgaggatctggagacattgcgcttgttcagtagagtggtcccggaatactgcactcagctgacagaggccgaggtgttgaaccaggcattcaacctgctgtttgcattcgatgagattgtggctctcggctacagagagagtgtcaacttggcacaggtgcggtcatttgtggagatggactcccatgaggagaagatttaccaagctgtgcgtcaggtgagtaaaacagacatattttcttattttgtaccttgtgagcaaatgaaaatattgttcacaatcgtcatcattgttaaacaatcatatagatattcacaatttaacggttgttggggaatcggggtttag

SEQ ID NO: 96 - DNA, 909 bp, Spodoptera frugiperda
  misc_feature (1)..(909): COP I epsilon
atggcacgtcagcaacaagatgttgatgagcttttcgatgttaaaaatgcattttacgttggaaattaccaacaagcaataaacgaagcgcagagtgtatcgccgtcaacaccgctgatagccctccaacgtgatgcattcctgtatcgatcgtacatcgcccaaggcaactataggatcgtgctgcaagagctgaagaccgcggatcctatgctgcagcctttgaaaacattagtggagtacctgtcacccggtgctaacaaaccggctatcgttgctgatattgatgctcgtgtggctaaaggcatagagttgtccaatgagattttcctgattgtagcggccactatctactaccatgaggataattatgaagcagctcttaaaatcctccacaatgctgactccctggagctccgtgcctttactctgcagtgtctcctggccatgaatagaccagacctggctcgcaagcagctcaagctgctgcaagatattgaagatgacagcaccttgacacaactcgcacaagcatggctgaacttgtcacagggaggaccaggagtgcaggacgcccactatagtataatggagctgtcggagcgactgggcgcgctggggcccgggcctgccgccgtcggagccgccgccgctgcctccagaggtatgtgggaggaagcggagcagatgttgtcggaggcgcaggtccgcgccccgcagcaacccgacctcctgctggggctcgccgtcaccgccgcacatagcgggaaggctcctgaggtattcaaccgctacatcgcccagctcctggacagccacccagaccacccattcactaaagagcaccacgcgaagaccaacgaattcaagcgtctcgccgcccagtaccaaccgtcggtgccaagttaa

SEQ ID NO: 97 - DNA, 1728 bp, Spodoptera frugiperda
  misc_feature (1)..(1728): verm (vermiform)
atggctcgacacgcgtgtctgtgtcttggtgtgttgttgctcagctgtctcgtgaccggtgaattgcgagttaagcggcaggaggaggacggaggagatgatgtgaacgcagaacagttgtgcgatggtcgcccggctgacgagtatttccgtctcaccaccgaaggagactgccgcgatgtagtcaggtgcgacaaaggcggtgagaacggcgtgactcggctcgcctcagtgcgctgccctggtggtctcgccttcgatatcgaccgtcaaacttgtgattggaaaacacatgttaagaattgcgacaaaatagaaagtcttaaacaaatcacttgcccgtctggactggcattcgatcttgataaacaaacctgcgactggaagggtaaagtgaccaactgtgacaaacttgagaaaccaaggaaagtgttgcctatcctgaaaacggatgagccaatctgtcctgaaggaaaattagcttgtggaagtggtgactgtattgaaaaggaacttttctgtaatggcaaatttgactgcaaggatgagtctgacgaaaatgcttgtactgtcgacgtagatcccaaccgagccccagactgtgatcccaaccagtgcgcactgcctgactgtttctgctccgcagacggaactcgtattcctggaggtattgaggtcaaccaagtgcctcaaatgatcacaataaccttcaacggtgccgtaaacgttgacaacattgacttgtatgaacaaattttcaacggaaaccgtcataatcccaatggatgtcagattcgtggtacattcttcgtatctcacaaatacactaactatgctgctgtgcaagaattgcaccgtaaaggtcacgaaatttccgtgttttccatcactcacaaggatgaccctcaatactggagcagcggaagctacgatgactggttggcagaaatggctggcgctcgtttgatcattgaaagatttgccaacattactgactcgtcaatcattggcgtccgtgcaccttacctacgtgttggaggaaacaaacaatttgaaatgatggctgatcagtacttcgtttacgatgcctctattactgctcctcttggacgtgttcctatctggccctacacgctatacttccgcatgccccataaatgcaacggtaacgcgcacaactgcccatctagaagccacccagtttgggaaatggtaatgaatgaattggacaggcgagatgacccaactttcgatgaatcgcttcctggttgtcatgtagttgactcttgctccaacattcaaaccggagagcaattcgcacgtcttctgcgccacaacttcaaccgccactacagtaccaaccgtgcccctcttggtttccacttccatgcttcatggctgaaatccaaaaaggagtttagagacgagcttattaaattcatcgaagagatgttggagaagaacgatgtctacttcacctctcttattcaagttatccagtggatgcaaaaccctacagaactgacgtcactcagagatttccaagagtggaagcaagacaaatgtgatgtgaaaggtcaacctttctgctccctaccaaatgcatgcccccttacaactcgagagttaccaggggagacactccgtcttttcacttgcatggaatgtcctaacaactacccgtggatcctagatcctacgggagaaggcttcaatgttaagaagtga

SEQ ID NO: 98 - DNA, 516 bp, Spodoptera frugiperda
  misc_feature (1)..(516): kr-h1 (kruppel homolog 1)
tgtgacagacagttcgctcacagccgctctttctcgatccactaccaacgtgtccacctgggaatcaaactgcaaccctacaagccgcgagacagacgcccccacgtcgactgggtttgtgaaatctgtgggaagacttgtatttccaatgcatcgctggtctgtcaccagcgcatacacacgggagagaagccctaccagtgccgagactgccccaagcggttcagtatattccagagattaaagatccaccaacgcacacacactggtgagaggccgttcaagtgtacggtgtgtcccaaggcgttcaaacataaagctgctttaaacagacatgatcgggtacactccggagctaagccctaccaatgtattcattgtggaaaaactttttctcagtcaaactctagaaaactacatattaggactgtacatctaaagctgcctaccccctatcgcagcagtcggtataggactgaagatacagatgtgttagacaataatcccctgaaataa

SEQ ID NO: 99 - DNA, 762 bp, Spodoptera frugiperda
  misc_feature (1)..(762): Calcium-activated potassium channel
atgtttatgacctacgagagagctattaatctccgaactttaaaaggatgtaacgtagtgttggtgttcatcctgagtatagcatcgctcatcatctacttcattgacgcgtccagtgaagaggttgagcgatgtcagaaatggagcgacaatattactcagcaaatcgaccttgcctttaacatattttttatggtctacttttttatacgatttatagcagctagtgacaaactatggttcatgctcgagatgtattcatttgtagattatttcacgatacccccatcctttgtatcaatatacctcgatagaacgtggatagggctgagatttctcagagctctacgcttaatgaccgtgcctgatattttgcaatacctcaatatattaaaaacatcgagctcaattcggttggcgcaattagtttctatatttatatcagtgtggctgaccgctgccggcattattcatttgctggaaaactctggtgacccattagagttcgagaatgcccagaaactatcgtactggacgtgcgtgtacttcctgatagtcaccatgtccactgtaggttacggtgacgtattctgtcacacagtacttggaagaacatttttggttttttttctcctcgttggcttggcaatgttcgctagtagcattcccgaaattatagagctggtaggaagtaggtccaagtacagtggcgagctgaagcgtgaacatggaaagaggtatccgtttgataatataaagtga

SEQ ID NO: 100 - DNA, 1380 bp, Spodoptera frugiperda
  misc_feature (1)..(1380): InR2 (insulin receptor 2)
atgttaaaactttctttctttgttttgttaactaaattcataatttatttgtttcagaaattccgagactatgcggagaagttggcgagggtcgccagggaggaggccaggccagaacaaacacaagaaactccaccgacgatatatttcccgggctcttgtggcttgcattcatgcggcaaggaagcagcatgcatgccatacaacagtacgtcgcactactgccgctgcacttccaacgggctgcccgtcacccacgacttcaaatgccccagaagcacagttccagtgactctgaagcctatattgaatgtgatccctccgaggacgtcgaatgcctctgacaccagatacctgtcgtcagcgcccaccgcacaaatatccaaatcttcaagcagtggagaaatattcgcggaatctacgactgggaacggctcactaatagatacgggtatgagtgccggcgtgggcactttaatagccgtcacagtttcgggggccgttactttaatactactggtctcaattatcctactgtacctcaaaaagagaatgtgtcgggtcgatggcaaaacacaacctcgtgtgcgaccgggagagcctctgcttgctgaaaggtatataacgaaccctcagtatggagtctacggagcaggcaacgttccggtaccaggcactccaggagttatggacactgatgataccaacaagtcccaggtccagcttctagacagaaacgccctaacattccttgaagaggttggtgaaggatgctttggcaaagtccataaaggacttctcagaactaccgctgatgaacaagtagttgccattaaggtgctgaaagaaagtgcaggtcgcaatgctgaagaagactttgtgcgggaagtctccataatgtctgcgttcaggcatcccaacattcttgctcttgttggagttgtatacagagatgacatcaacgcgagcccttggatggttttcgaatacatggagtggggtgacctggccggcgttcttagaggctcccgcggaggaggcaggccggggccaatactggatgaacatgctttactacatgtagcactgcagatagcacgaggcatgcagtacctcgcttcacgaagattcgtccatcgagatctagcagcgaggaattgtcttgttggtgcaaacctcacagtgaaaatagcagactttggcatgtcacgagatgtctacacttgtgattactacaaaatgggcggcgagcgacccatgcccgtacgatggatgtcaccggagagtattgtgtacgctcggttcacgcacgagtccgacgtgtggtcgtatggcgtagtgctgtgggagatatacagcagaggcaaacaacctttctaa

SEQ ID NO: 101 - DNA, 1374 bp, Spodoptera frugiperda
  misc_feature (1)..(1374): tubulin 2
atgagggaaatagtgcatctacaggccggacaatgcggaaaccagattggagccaaattctgggagatcatatcggaggagcacggcatcgaccccaccggtgtgtaccgaggaactagcgaccttcagctcgagaggatctccgtatactacaatgaggcctctgttgcgacggcggagaacgggggcaagtacgtcccccgcgccatcctgctcgacctcgagccaggcacaatggacgcagtgcggtccggggcgtacgggcaactcttccggccggacaacttcgtgttcggccagtccggcgccggcaacaactgggccaagggacactacaccgagggcgctgagctcgtcgacgcagtactcgatgtagtgcgcaaggagtgcgagaactgcgactgtctgcagggcttccagctgacacactcgctcggcggcggcaccggctccggcatgggcacgctgctcatctccaagatcagggaggagtaccccgaccgaatcatgaacacatactccgtggtgccctcgcccaaggtgtccgacacagtggtggagccctacaacgcagtgctctctattcatcagctagtcgaaaacacagatgaaacctactgcatagacaacgaagctctctacgatatttgctatagaaccctcaaagttcctaaccccacgtacggcgacctgaaccacctggtatcgctcaccatgtccggcgtgacgacgtgtctgcggttccctggtcaactgaatgcggatctccgcaagttggcagtcaacatggtgccgttcccccgtcttcacttcttcatgcccggcttcgctcccctgacatcccgcggcagccagcagtaccgcgccctcaccgtgcctgagctcacccaacagatgttcgacgccaagaacatgatggcggcgtgcgacccccgccacggccgctacctcaccgtggccgccatcttccgtggccgcatgtccatgaaggaggtcgacgagcagatgctctccattcagaacaagaacagcagcttcttcgtggaatggatccccaacaatgttaagacagctgtatgtgatattcctcctaagggcttgaaaatgtcttctacatttattggaaacacgaccgccatccaggagctattcaagaggatatctgagcagttcaccgctatgttcaggcgcaaggctttcttgcattggtacactggcgagggcatggacgagatggagttcaatgaagctgagagcaacgtaaacgacctggtgtcggagtaccagcagtaccaggaggcgacggcggaggacgacacggagttcgaccaggaggacatggaggagctggcgcaggacgagcaccacgactag

SEQ ID NO: 102 - DNA, 528 bp, Plutella xylostella
  misc_feature (1)..(528): pre-mRNA splicing factor
gcgaggctgcgcatgatgcaggcccagataaccgacaagtcttcaatggcgtaccaaagactggcatgggaagccctgaagaagtctatacatggtcatatcaacaaaataaacgtcggcaacataggcattatcataaaagagcttctgagagaaaacatagtccgcggtagaggtttgctgtgtcgatcagttatccaagcgcaggctgcttcacccacattcaccaatgtgtacgcagctctggtggccgccgtcaactctcgcttccccaacattggtgaactgctgctcaaaagacttgtcatacagttcaagagaggcttcaaacgtaatgacaaacccttgtgcatatcttcagcttcattcatagctcatcttgtgaatcagcgggtagctcacgagatcctggctctggagctgctcacgctactagtggagactcccaccgatgattccgttgaagttgccatttcattcctgaaagaatgtggacagaaactgactgaagtgtcattgaagggggtg

SEQ ID NO: 103 - DNA, 1158 bp, Plutella xylostella
  misc_feature (1)..(1158): COP I gamma
atgagttcattccggcgagacaagaaggaggaagaggaaggcgggggaaatccattccagaacctggacaagaccacacttctgcaggaagcacggtacttcaacgagacaccagtcaaccacaggaagtgcacgctgattctaaccaaaatcctgtacctgttgaaccacggagatcaggagttgaccacacaagaggctactgagatctttttcgccaccacaaagctatttcaatcgaaggatgtagtcctgcgtcgattggtttatctcttaatcaaagaattgagttcgcaagctcaagatgttatcattgtaacatcttcgcttactaaagatatgactggcaaggaagacttgtaccgtgccgctgctattagagctctttgcagcataacggacagcacaatgctgcaagccattgaaagatacatgaagcaggccattgttgacaagaatccagcggtcagctctgcggctctggtgtctgcgctgcatctctccgctactgttccagacctggtgcggcgctgggctaatgaagcacaggaagccatcatgtctgataacatgatggtatcgtaccacgcactaggagtagtggttggaagtcgtcgcaacgaccgactctcgactgtgaagctcatcactaagctggcgaaatcatctctgcgcacaccgtacggagtgtgcctcctcatccgccacgctgccaagttagctgaagaagacggcaatgacgcatctgatgtctacatcgacttcattgagtcttgccttcgccacaagtcagaaatcgtggtatacgaggctgctcacgctatcgtcaatctaaggaagtcggccagagatcttgcccaagctgtgtctgtgttgcaaatcttctgcggttcctccaaggccactctgcgcctcgctggtgcccgcactttggcgaaactgacagccaagcatccgaatgctgtcgcagcttgcgctgtcgacctggaaaacttgatttcggacccgaaccgttctgtagccactcttgcggttacaactcttcttgccactggggctgaaagctcaatcgatcgtctgatgaagcagatttccacattcatgtctgaaatctcggatgagttcaagattgtggttgttcgtgcaattaaacgtctt

SEQ ID NO: 104 - DNA, 408 bp, Plutella xylostella
  misc_feature (1)..(408): COP I zeta
aacacctttgagtctttgctcgaagttatggataatgaaagaatagagaagctccgtgagctatacgagtgtgtggaagacatagacttgctcgccggcatgtgggcggagaacctggtccctgggggcttcgttccgcacacgttctactgcctggtctccgagcatctggtcaggaacgtggtttccgaccgacactggtacgagcgggcggagcgaccactggcctttagcgcacatcagctgcgtgaagtgaggaatgccacgatggcacgtctcctgtgtgacaacggagactccgtcagggccatccaaccgagagcattcgaaaggatagcccctggcaatgacctggtgagctgtgaccagatcccgccggtgaacctcgtggcttggaaggacagaagc

SEQ ID NO: 105 - DNA, 1056 bp, Plutella xylostella
  misc_feature (1)..(1056): COP I beta prime
ctatacctgaacgacaaggagctcaacgtggtgtcctattcccttctgctgccggtgctggagtaccagacggcggtgatgcgaggggacttcgagacggcggacaaggtgctgccggtcataccgcatgaacaccggacaagggtcgcacacttccttgagaaacagggcttcaagcagcaagctttagccgtctccacggagccggaacaccagttcgagctggccctagctttaggcgagttacgaagagcccgccaactagccgaggaggcgacggcggctgaaggagctccgtcgaggacctccgccgctcggtggtcgcgcctcggggccgccgccgccgccgccgccgacacggagctcacgaggatatgcttccagaatgcgcacgattatggggggctgctggtgttcgctactagcacaggtgacaaagagctgatgaaggagatagcagacatggccctgaaggagggtcagaacaacgtggcattcctcgcgtacttcacactgaacgagctggagacctgtctgaagctgctcatagacaccgacagactcgccgaagccgcattctttgccagatcgtacatgccatcgaaggtggtggaagtggtgaagctgtggcggcaggaggtgaccgccaccaccaacaagaagtcgggccaggcgctcgccgaccccgagagctatgagaacctcttccctgaattcgccgaaagtctagaactagagaagtaccaggcagaattcggctacgagtacagttccaacctcgcaaacattccagacaattacaaactcagcaatattgacagagatttggctttagagaaagccgaagcagagaaactcggcctataccaccccagcgcttcagtccaaagcaccgagcccaaagagccctctccggaggtgtcgtcagccacggaggccaagctgaagcgcaagaactccctggacatgatggaggagctagagaaggagctggatgatgtgcaactggaggacagcgtggaaagcctggatttgtcggatgaagcagatttgatc

SEQ ID NO: 106 - DNA, 624 bp, Plutella xylostella
  misc_feature (1)..(624): COP I alpha
  misc_feature (291)..(306): n is a, c, g, or t
atgcttacaaaattcgagacgaagtccgctcgggttaaaggcatatcatttcacgccaaaagaccgtgggttttagctagtttgcacaatggtgtgattcaactgtgggattatcgtatgtgcacattattagagaagtttgatgaacacgacggcccggtccgtgggatctgcttccacattcaacaaccattattcgtatcgggaggcgatgactacaagatcaaggtatggaactacaagcagaggcggtgtctgttcacactgctcggacacctggactacatccgnnnnnnnnnnnnnnnnacctgcttccaccacgagtacccctggatactcagcgcttctgatgatcagacaatcagaatctggaactggcagtctcggcagtgcatcagcgtgctcacaggccacaaccactacgtgatgtgcgctcagttccaccccaccgaggacctgctggtgtccgcgtcgcttgaccagtctgtgcgagtgtgggacttctccggcttgaggaagaagagtgtggctccaggcccgacaggcttggctgatcatttgaggaacccccaggccactgatttgtttggacaggcggacgcagtggtaaagcacgtgctagag

SEQ ID NO: 107 - DNA, 627 bp, Plutella xylostella
  misc_feature (1)..(627): COP I delta
cgtctacgcagcgagggcgacacggttccaactgccgccgcgcccgggaaggagaaggaagtggtccataaggatcataacgatgtccaccttcgatttgaggagcggttgaacctgacggccgggcgcgacggcgacgtgcaacactacgaattgtcaggtttgttgactctgcgcatcagcaacgagcagttcggtcgcatccgcgtgcatctcgacaacaaggacaccagagcgctgcagttacagacccacccgaacgtcgacaaagaggcgttccgcgccggcggacttattgccctgaagcagtctcagcggccgttcccgctgcacagcgacgtgggcgtgctcaagtggcggctgcagggcggggacaagacgccactttctataaactgctggccatcggaggcggcgggcggcggctgcgacgtcaacatcgagtttgaactggaacagacgcacctggtcctcactgatgtcgtcctcaacattcctctgccttccggcaacagctcggtagtggtccaccaatgggagggcagctacgcgcagaagggacgggccctagtgtggagcatccctgtcatagacgaggaacacaagaccggcactctggagttcacc

SEQ ID NO: 108 - DNA, 1146 bp, Plutella xylostella
  misc_feature (1)..(1146): COP I epsilon
  misc_feature (579)..(582): n is a, c, g, or t
agcgcgacatcgcccggcaacacctgaagtcaacacttgaaaaaggtcacggaacagttcccagatgatgttgaagcgtggatcgaactcgcgcagatattggagcagaatgacttgcagggctcgctaaacgcgtacacaacagccatgaagatcctcaaagacaaggtgaacacggagatacccgcagagatactgaacaacgtggcggcactgcactaccggctcggcagcctgcaggaggccgctgcgtatctgcaggaggccagggagagagaacgggtggacgcagagacgttggacgcgcaatactacaactctatagcggtgaccaccacctacaacctggccaggctgaatgaggccttgtgcatttacaataaggctgagaagctttacaaggacatcctgaaagagcatcccaactatattgactgttatttgagactaggctgcatggcacgcgacaagggccaaatctacgaggcgtccgactggttcaaagaggccctcaaagtgaacaccacccacggagacacgtggtctctactgggcaacctgcatttagcacagcaggannnntgggggcccggacagaagaagttcgagcgagtactgcacaaccccaacactagcactgacgcctactcgctcattgctctagcgaacgtgtggcttcagacgctgcaccagccgtgtcgagagaaggaccgggagaagaggcatcaggagagagctctcactatgtacaaacaggtgctgaagaccgatcagcgtaacatctgggcagccaacggtattggctgtgtgttggcgcataagggttgcgtgaacgaggcccgtgacatattcgcgcaagtccgcgaggcgacggcggacatgcccgacgtttggatgaacattgcccacatctacgttgaacagaaacagtacctcaacgctatacagatgtacgagaactgtcttcgcaagttccgtatgcaccacgacgtagaatggctgacgtggcttgcgcgcgcccacggactggcttcacggccgcacgccgcccgcgccacgctcctgagggccagacgtgtcgcgccgcatgatacggcactgctgtataatactgcgttgacgttgaggagactagcggctcatgtg

SEQ ID NO: 109 - DNA, 972 bp, Plutella xylostella
  misc_feature (1)..(972): verm (vermiform)
ccacgtaaaattctgccaatattgaaaacggatgagcccatctgcccagagggaaaactggcctgtggaagtggagactgtatagaaaaggaattattctgtaacggaaagcccgactgcaaagatgagtccgatgaaaatgcttgcaccgttgacgtggacccgaacagggctcccgactgcgaccccaaccagtgcacgctgcccgactgcttctgctccgcggacggcacgcgcatccccggcggcatcgagcccaaccaggtgccgcagatgatcaccatcacattcaacggagccgtcaacgtggacaacattgacttgtacgaacaaatcttcaatggaaaccgcaacaaccccaacggttgccaaattcgtggaaccttcttcgtgtcacacaagtacaccaactacgctgctgtccaagagctgcaccgtaaaggacacgaaatttccgtattctcaatcacgcacaaggacgacccgcagtactggaccagcggcagctacgacgactggctggccgagatggctggagctcgtctcatcgtcgaacgcttcgccaacatcactgacgcttcgatcattggagtccgtgctccttacttgcgtgttggaggcaacaagcaattcgaaatgatggctgaccagtacttcgtgtacgacgcctccatcaccgctcccctcagccgtgtgccaatctggccctacactctctacttcagaatgccccacaagtgcaacggtaacgcacacaactgcccgtccagaagccaccccgtgtgggagatggtgatgaacgagctcgacaggcgagacgacccgaccttcgacgagtcgctgcccggttgtcacgtggtggactcgtgctcgaacatccagaccggcgagcagttcggacgtctcctgcgtcacaacttcaaccgtcactacaataccaaccgtgccccgctaggtctgcacttccacgcc

SEQ ID NO: 110 - DNA, 357 bp, Plutella xylostella
  misc_feature (1)..(357): kr-h1 (kruppel homolog 1)
tgcgggaaggtgttccctcgcagcgccaacctgacgcgccatctgaggacccacacgggcgagcagccgtacaagtgcaagtactgcgagcgctccttctccatctcatccaacctgcagcggcacgtgcggaacatccacaacaaggagcgtcctttcagatgtccgctgtgcgaccgctgcttcggccagcagaccaacctggaccggcacctgaagaagcacgaggcggaggggggcgactcgccgagctccgcggacactgagcgtgaggacacttactttgatgacatccggtcgttcatgggcaaggtgacgtgctccccgggcgcgggccccccccccgccacgtcccca

SEQ ID NO: 111 - DNA, 1203 bp, Plutella xylostella
  misc_feature (1)..(1203): Calcium-activated potassium channel
  misc_feature (1203)..(1203): n is a, c, g, or t
tgcctgaaggacacggacctgatccgcgcccgcatgaacgaggccgaggcctgcttcatcctggccgccaggaactacgctgataaaaccgctgctgatgaacacactatcctcagatcttgggccgttaaagactttgcccccgatgtcccgcaatacgttcaaatattccggcccgagaacaagctgcacgtgaagtttgcggagtttgtcgtctgcgaggatgagttcaagtacgcgctgctggccaacaactgcacctgccccggcgcctccaccctcgtcaccctgctgctccacaccagcagaggacaagaagggcaacaatcaccggaagaatggcaccgcctatacggaaaatgttcaggaaatgaaatttaccatatcgtcttaggagatagtcgcttttttggagaatatgagggcaaaagttttacgtatgctagttttcattcacacagaaagtacggagtggcattagttggggtgcgcccagcagaactgccggaattctatgaagagacaattttgctgaacccaggcccacgacatatcatgaaaagcagtgacacttgctactacatgagcataactaaagaagagaactcggcgttcgtagttgccgacaagcaaatcgaatcaaaaccgccgatacctaaagatcagactgcatgtagtcttctttctaccgagaggaaaagtgcagatactgaggagtgcaaccagctggctagaactgacggtagtagcgtgcctcaatacgacctcccacaagtgattctgcaagttcccgcgagtaccacaccaaatgcatcgccatcacatatcaatcaagctaatactgtatcatccgctaaatttaccgctactagttcaagatacggagagggcactacatcggactcgtgggctctaaaagaagcagaaggatcgaccgatagccatttactgttgccaaagcctgataatccaaactttttaagtcctgatgctctgagtcatcgccgagggagtaggaggccgtcgatactaccagttccggacatggtatctacaagtctaaacatactatccgacaaccaagatgatgatgccgagggcgatgagagtgaggacgaactagaagacgatgtcccgtggaggtcaccttccgaaaaaattgcgatcgtcaaaggttttccacctgtatcaccattcataggn

SEQ ID NO: 112 - DNA, 1431 bp, Plutella xylostella
  misc_feature (1)..(1431): InR2 (insulin receptor 2)
accttccgcacttccgatgaagtgaacgcggacgtcgtaaagaacgtgcgagcagaaatcatatcttcaaacaagacgctgccagcggcggaagtcaacgtgacgtgggacccgccagacgaccccaacggctttgtcgtggcttacgacatgcatcataccagggtggaggctaacagtccgacggcagacgtgggcctgcacagctgcatgagtgcagatgactacgagagcaacggcggcggctaccttctacgcaacctggcccccgggaactatagtgtcaaggtcacgcctgtcactataggcgggcccgggaacgtgtcggcggagatctacgtgtttattcctgagcgcgggctgggctcgggctacgagtgggtgtggggcgtggtgggcggctgcgccatcatgctgctcatactgggcggcggagtgtggtacgctcgccgctcattcttaacccccaacgaagcgaacaagctgttcgcgagcgtgaacccggagtacgtgtccacggtgtacgtgccggacgagtgggaggtgccgcgctccaacatcgagtacgggaaggagctggggcagggctcgttcggcatggtgtatgaaggcgttgcaaagaacattgtcaaaggccaagcggaaactcggtgcgctgtgaaaactgtcaatgaacatgccactgacagggagcgcatcgagttcctcaacgaagcgtcagtaatgaaggccttcgatacgtggcacgtggtgcgtctgctgggcgtggtgtcgcgcgggcagcccacgctggtggtgatggagctgatggagctgggcgacctcaagtcgtacctgcgctcgcaccggcccgacgccgacgccgtgccgcccgacctgcatcagatacagcagatggcgatagagatcgcggacggcatggcgtacctgtccgccaacaagttcgtgcaccgcgacctcgccgccaggaactgcatggtcgccggggacctcaccgttaaggtgggcgacttcggcatgacgcgcgacatctatgagactgattactacaggaagggctccaaggggctgctgcccgtgcgctggatgagccccgagagcttgaaggacggggtgttttcgagcaatagtgatgcgtggagttacggcgttgtcttatgggagatggcgacgctagcaatgcagccttatcagggtctctccaacgagcaagtggtccgctacgtagtagaaggcggcgtgatggagcgtcccgaacactgccccgaccggctctacgagctcatgcgcgcgtgttgggcgcacaaaccgagctcgcggccctccttcctgcagctggtggctgagttagcgcccgccgccaagccctacttccgacagcggtcgttcttccacacacctcaagggcaagaactgtacgcgcaacagcgg

SEQ ID NO: 113 - DNA, 759 bp, Plutella xylostella
  misc_feature (1)..(759): tubulin 2
atgagggaaatagtgcatctacaggccgggcagtgcgggaaccagattggcgccaaattctgggaaataatttctgaggagcacgggatcgaccccaccggcgtgtacaagggcaccagcgacctgcagctcgagaggatctccgtgtactacaatgaggcctctgttgcgacggcggagaatggcggcaagtacgtcccccgcgccatcctgctggacctggagcccggcaccatggacgccgtgcgctccggccagtacggccagctgttccgccccgacaacttcgtgttcggccagtccggcgccggcaacaactgggccaagggtcactacaccgagggcgccgagctcgtcgacgcagtgctagacgtagtcaggaaggagtgcgagaactgcgactgcctccagggcttccaactcacacactcgctcggaggcggcaccggctccggaatgggaacactactcatctccaaaatcagagaagaatatcccgacagaatcatgaacacatactccgtagtaccctctcccaaagtctctgacacagttgtagaaccttacaatgccgtcctctccattcaccagcttgttgagaacacagacgagacctactgcatagacaacgaagctctctacgacatctgctatagaacccttaaagtccccaatcccacgtacggcgatctcaatcacttggtgtcgctcaccatgtccggagtcaccacgtgcctgcggttccccggtcagctgaac

SEQ ID NO: 114 - DNA, 522 bp, Plutella xylostella
  misc_feature (1)..(522): PRGP-LE
  misc_feature (35)..(58): n is a, c, g, or t
tgcgatgtactaacgagaagcgaatggggcggggnnnnnnnnnnnnnnnnnnnnnnnnaagacctcccaaggccgatcgacctggtgatcatccagcacaccgccaccgacacctgcaacaccgacgaggaatgccaggaatacgtgcagtggatacaaatttatcatatgcagagtttgaactattgggatataggaccgaatttcctgattggtgggaacggcaaggtgtacgagggccccggctggctccacatgggggctcacactcacggctacaacaggaagtctgtcggcatatccttcattggcaattttaatgatatcatcccaaccaatgcctccttgcttgctgctgaaaaattaattgaatgtggggtgacagaagagcatctatctccctcgtactcattagttggtcatagacagctgagaccaactgagagtccagggaagaatctgtacgaaattatccagaagtggccacactaccttgaaaatgttgatgacatcataaacaac

SEQ ID NO: 115 - DNA, 388 bp, Plutella xylostella
  misc_feature (1)..(388): PGRP
tgggcggatattgggtataatttcgcggtgggcggcgacggcgcggtgtacgagggccgcggctgggcgctgctcggcgcgcacgcgctgcacttcaacaccgtcagcctcggcgtctgcatcatcggggactggactgattccctaccaccgcggaaccagctcaaagccgtgcaagccctcatagccgaaggcgtggcgcggggagccatcacacccaactaccgcctcgtgggacaccgccaggtccgcgccaacacctcctgtcccggagacgcactcttcaaccacatccagacctggaaacagtactccgcgtttccagcctcctggaaggatctagtcgacgtacctgaactgcccaagagtgatagggatgtggtgcgta

SEQ ID NO: 116 - DNA, 420 bp, Plutella xylostella
  misc_feature (1)..(420): VATpaseE
atggcgctcagcgatgcagatgtccaaaaacagatcaagcatatgatggccttcatcgagcaagaggcaaatgaaaaggccgaagaaatcgatgctaaggctgaggaggagttcaacatcgagaaggggcgtctggtgcagcagcagcgcctcaagatcatggagtactacgagaagaaggagaagcaggtggaactccagaagaagatccaatcctccaacatgctgaaccaggcccgtctgaaggtgctgaaggtgcgcgaggaccacgtgggccacgtgttggacgagacgcgccgccgcctcgccgaggtgcccaacgaccaggggctctactccgacctggtggtcaagctcatcgtgcaggcgctgttccagctggttgagccaaccgtaaccctccgcgtgcgcgaggccgac

SEQ ID NO: 117 - DNA, 409 bp, Plutella xylostella
  misc_feature (1)..(409): ABCE
tcatctgctgtctgtacggcgtgcccggcgcgtacggcgtcgtcactatgcccttctctgtacgagaaggtatcaacatattccttgatggtttcgtgccgactgagaacatgagattcagaactgaatccctagtattcaaagtagctgaatctgctacagaagaagagataaaacggatgaaccattatgagtatccagagatgacaaagaaaatgggtgacttcagtcttagggtcaagcaaggagagttctctgactccgagatcttggtgcttctcggagaaaatggaactggaaaaaccacattcatcagaatgttggctggcaacttggaacccgatgatggctcgggccacctgccgcagttgcacattagttataagccacagaagatctcgcccaagtc

SEQ ID NO: 118 - DNA, 414 bp, Plutella xylostella
  misc_feature (1)..(414): TH
actccaactgttgaggtgggcactcagcaggacgacactaaagatggtcaactcgccgatgcggaggtcggtggaatagacggaaatgcagatgacgattacaccttgaccgaggaggaggtgatcttgcagaactccgccagcgagtccccggaggccgagcaggcgctgcaacaagcggctttgcttctgcgcctgcgcgacggcatgggctcgctcgcgcgcatcctcaagaccatcgacaactacaagggctgcgttcaacacctcgagacccgcccctccaacgccaacgacatccagttcgatgctctcatcaaagtgagcatgtctcgcggcaacctgctccaactcatccgatctctccgccagtccaccgccttcgccggcgtcgacctcatctccgacaacgtc

SEQ ID NO: 119 - DNA, 376 bp, Plutella xylostella
  misc_feature (1)..(376): Hemolin
gacctgcgcgcgcgcagacgaccccaaccaaggtggcattagaacgtggttgagaaacgggacgccattagaagacggcaaaatgtctcccgaaataaaattcctcgacgacaaatcacttctggtgttgcagccctcaccagccgtggaaggggtctaccaatgcttcaccgaaacccataagggcattgcaacctccccgaaattcagcgtgaaacagacttatctcaaagctccagagactacgccttcagtcaatatcaaaccagcaaaaggccttccctttagcttggactgtgacgtccctgaaggatatccgaagcctgaagtgcaatggttcctacaacacgggaaagatcacaccctgattgaggca

SEQ ID NO: 120 - DNA, 289 bp, Spodoptera frugiperda
  misc_feature (1)..(289): TH
gccgtcgcagctgcccagaagaaccgcgaaatgttcgccatcaagaagtcctacagcatcgagaacggttatccgtctcgtcgccgctcgctcgtagacgatgccaggttcgagacactggttgtcaaacagaccaaacaaagcgtactggaagaagcacgcgcccgcgccaatgactctggcttggattccgattttatccaagacgggattcatattggcaatggtgataactcgccgactgtcgaagatggcacccaacaagacgagactaagaacggtcacctcg

SEQ ID NO: 121 - DNA, 284 bp, Spodoptera frugiperda
  misc_feature (1)..(284): Hemolin
atgaagttgactgttgtcagtgctccaaaactctcaaagtcagcggaaaagcagatcaacgtgaaagaaggtcaagatgtcgccattccctgccaagttaccggtttgccggagcctaaggtgtcttggacatacaacgccaagtctctaggcgagagggcaatttacaaagatggtgttttgaccatcaagaacgccaaaaaggcgatactggctattacggatgcaaagccgaaaatgaacacggagatttgtactccgaaactttagtccatgtcgcttag

SEQ ID NO: 122 - DNA, 501 bp, Spodoptera frugiperda
  misc_feature (1)..(501): vATPasesubE
agatcatggagtactatgagaagaaggaaaagcaggtcgaactccagaaaaagatccaatcctcaaacatgctgaaccaggctcgtctcagggtgctcaaagtacgtgaagaccatgtacgcaacctgttggacgaggcccgcaagcgcctggctgaagtacccaaagaccagaagctgtacactgacctgctgaccgcactcatcgtacaggccctcttccagctgatggagcccgcagtgaccctgcgtgtccgtcaggcagacaagtccttggtggagtcagttctgtcaaaggcccagagcgactacaaagctcagatcaagaaggacactgtattgaagatcgacactgacaactggctgtcacctgacacctgcggtggaatcgagcttatcgctctcaagggacgcatcaagatctgcaacaccctggagtctcgcctggagttaatcgcccagcagctgctgcctgagatccgtaccgccctcttcggccgca

SEQ ID NO: 123 - DNA, 501 bp, Spodoptera frugiperda
  misc_feature (1)..(501): ABCE
aagggcactgtcggtcaactccttgacaagaaagatgaaagaaaaaaccagactgaaatttgtaaaatgctggatctatcgcacatccgcgatcgtgagatcgccgccctgtctggtggagagctgcagcgctttgcttgcgctatggtgtgcatccagaatggagacattttcatgtttgatgagccctcttcttacttggatgtcaagcagcgtcttaacgctgcccgcacaattcgatcactcatccatcctgacaagtttattatagtggtggagcacgacttgtcagtgttagactacttgtctgacttcatttgctgcctgtatggcgtacccggtgcttacggtgttgtgactatgcctttctctgtaagggaaggtattaatatattccttgatggatttgtccccaccgaaaacatgagattcagaactgaatcgctagtatttaaagtcgccgagtccgctactgaagaagagatcaaacgaatgaaccat

SEQ ID NO: 124 - DNA, 461 bp, Spodoptera frugiperda
  misc_feature (1)..(461): ABCE
tgacaagattagggatgcttatatacatccacagtttatcacagatgtgatgaagccaatgaaaatagaggagattatggaccaggaggtgcaaaacctgtctggtggtgagttgcagagagtggccctggtgctctgcctcggcaagccagccgacgtctatctaattgacgagccctctgcctacctggactccgaacaacgtttggtagctgctaaagttattaaaaggttcatcctccacgcaaagcgtacaggcttcgtagtagagcacgatttcataatggcgacgtacctggcggaccgtgtgatcgtgttcgaaggcactccctcggcgcatgccactgcgcacgccccgcagtctctactcaacggcatgaaccgattcttagaattactcggcatcaccttccgaagggatcccaacaacttccggccgaggataaacaaacatgcttctg

SEQ ID NO: 125 - DNA, 450 bp, Spodoptera frugiperda
  misc_feature (1)..(450): IAP
atgtggtcgtgttccttaccttgttggaatacaaaaaaatctggattacaaatggatattaccaaagtggcatccaatggctcctcctcaacattaacgctattcaagagcggatcgcttgaggctaaaattcgacctctcgcgccactaatgctgccgacgccaagttacgactccaacgccggctctccatctttgtcaccatccacgccttgttcttcatcttctttctccattgataaaaccgacaaccacgacaccttcggcttcagtgcggacacagttgatatgagaaaagaggatgaacgtatgaaaacatttgaaaaatggcccgtcagttttctatccggagagcaacttgctcgaaatggattttactacctcggccgtggagatgaagtccgttgcgctttctgtaaagtggagattatgaggtgggtggagggcgat

SEQ ID NO: 126 - DNA, 301 bp, Plutella xylostella
  misc_feature (1)..(301): PGRP
cgccccctcgcgcgcccggcgccctacgtggtccttcaccactccttcaccccccccgcgtgtgctgatgctgctcagtgtgaggaggccatgagggtcatgcagaacatgcatatggatgggcatgggtgggcggatattgggtataatttcgcggtgggcggcgacggcgcggtgtacgagggccgcggctgggcgctgctcggcgcgcacgcgctgcacttcaacaccgtcagcctcggcgtctgcatcatcggggactggactgattccctaccaccgcggaaccagctcaaagccg

SEQ ID NO: 127 - DNA, 328 bp, Plutella xylostella
  misc_feature (1)..(328): vATPaseE
atggcgctcagcgatgcagatgtccaaaaacagatcaagcatatgatggccttcatcgagcaagaggcaaatgaaaaggccgaagaaatcgatgctaaggctgaggaggagttcaacatcgagaaggggcgtctggtgcagcagcagcgcctcaagatcatggagtactacgagaagaaggagaagcaggtggaactccagaagaagatccaatcctccaacatgctgaaccaggcccgtctgaaggtgctgaaggtgcgcgaggaccacgtgggccacgtgttggacgagacgcgccgccgcctcgccgaggtgcccaacgaccagg

SEQ ID NO: 128 - DNA, 314 bp, Plutella xylostella
  misc_feature (1)..(314): ABCE
tctgtacggcgtgcccggcgcgtacggcgtcgtcactatgcccttctctgtacgagaaggtatcaacatattccttgatggtttcgtgccgactgagaacatgagattcagaactgaatccctagtattcaaagtagctgaatctgctacagaagaagagataaaacggatgaaccattatgagtatccagagatgacaaagaaaatgggtgacttcagtcttagggtcaagcaaggagagttctctgactccgagatcttggtgcttctcggagaaaatggaactggaaaaaccacattcatcagaatgttgg

SEQ ID NO: 129 - DNA, 501 bp, Plutella xylostella
  misc_feature (1)..(501): TH
cactccaactgttgaggtgggcactcagcaggacgacactaaagatggtcaactcgccgatgcggaggtcggtggaatagacggaaatgcagatgacgattacaccttgaccgaggaggaggtgatcttgcagaactccgccagcgagtccccggaggccgagcaggcgctgcaacaagcggctttgcttctgcgcctgcgcgacggcatgggctcgctcgcgcgcatcctcaagaccatcgacaactacaagggctgcgttcaacacctcgagacccgcccctccaacgccaacgacatccagttcgatgctctcatcaaagtgagcatgtctcgcggcaacctgctccaactcatccgatctctccgccagtccaccgccttcgccggcgtcgacctcatctccgacaacgtctccagcaagaccccgtggttccctcgccacgcttccgacctcgacaactgcaaccacctgatgaccaagtacgagcccgagctcga

SEQ ID NO: 130 - DNA, 301 bp, Plutella xylostella
  misc_feature (1)..(301): Hemolin
ccggtggtgttgacctgcgcgcgcgcagacgaccccaaccaaggtggcattagaacgtggttgagaaacgggacgccattagaagacggcaaaatgtctcccgaaataaaattcctcgacgacaaatcacttctggtgttgcagccctcaccagccgtggaaggggtctaccaatgcttcaccgaaacccataagggcattgcaacctccccgaaattcagcgtgaaacagacttatctcaaagctccagagactacgccttcagtcaatatcaaaccagcaaaaggccttccctttagct

SEQ ID NO: 131 - DNA, 164 bp, Plutella xylostella; identical to SEQ ID NO: 17
  misc_feature (1)..(164): IAP

SEQ ID NO: 132 - DNA, 455 bp, Spodoptera frugiperda
  misc_feature (1)..(455): Proteasome beta
atgttgagtgttaatgaaaactttcccgaatatgcagtgcctggagctaaacaagttcgttttgaaccctacgctgatacacgtctgagtacgggtttctccatctatacaagggaacagaagaaactatttaagctttcggacaaaactgtgggtgcaacaggctgctggtgcgacactctcactctgacccggctgatgcaaatgtacgagcacgaacataacaagtcaatgtctacaccagccgtcgctcaaatgctctccacgatgctgtattacaagcgtttctttccatattatgtatcgaatggctggtggatctgcaggtgctcagctacagccattgctggacaatcaaattggtctcaagaacatgcagaatgtaactgaagctcccatacctaaagaaaaggctttggccttgttgaaggatgtttttattagtgctgctgagc

SEQ ID NO: 133 - DNA, 439 bp, Spodoptera frugiperda
  misc_feature (1)..(439): RpII 140
aaaaggattggtgaccaagaggaacagtttgaaaaacctactcgacaaacatgtcaaggcatgagaaacgctttgtacgataaattagatgatgatggcatgccatttacttgtgagggtataacccccgatattattattaatccacacgctatcccatgtataacggacatacaggtcgaaagataaatgcccaagtctttttgggtcccacatattaccaacgtctgaaacacatggtggatatggaacgggattgtcaaattgctcatggcgcggcacaattcttacgtgaacgtcttttcgaagtttctgatccttatcgtatacacgtttgcaacttctgtggtcttattgcgattgcaaacttgagaaataatacctttgaatgtaaaggatgcaagaataagactcaaatatcgcaaataaggttgcctta

SEQ ID NO: 134 - DNA, 474 bp, Spodoptera frugiperda
  misc_feature (1)..(474): Rop (Ras opposite)
tatgaatgaggtgatccggtaccggtcaaagggaaaggataaaatagaatgaagagggagccactgtgcaccatggacggcatctacctcatcactccatctgaatttgacgaattatctcgtagtcctgtagctaaatatatcaaaacattaaaggaaatcaacattgcttttattccctatgaacaacagtgtcgcctttactgcatgagctgactcttcaagccatggcatacgatctcttgccaattgagaatgatttaactttatatgactcgtctggaaatatgaaggaagtactggactcaatgtcgtggttgatggcaacagaaagaagcaatatcaagtacccaggaaggagaggatcactgagcaaacataccaaatgtcaaggtggacacctcccactagcgtgcgctacggacactggcataaggacaaggcgcagcagactattaagaacgtgccgcgact

SEQ ID NO: 135 - DNA, 465 bp, Spodoptera frugiperda
  misc_feature (1)..(465): Voltage-gated potassium channel
tgggttccttgggctgatattcgcctcatttctggtatacttagctgaaaaagacgtcgccgacacaaagttcaaaaatttcgccgaggctttgtggtacggcgacatggtgccgcagacctggcagggcaagttcatagcctccttctgcgcactgctcgggatctctttcttcgcgctgcccgccggaatactgggctctggttttgcgctcaaagtccaacagcagcaacgtcagaaacatatgattcggcgacgtcagccggctggcactccatgagtgtggccacttggaaaatacaccaagtacctcttcctagtccgcaagagtgcgtcgttcaagaacaatgcatcctttgtgtcgcgcctgccgactatccgccgcggcgcgcgcgccgcctgtccaaccggcacacagcgaggactcggtcgcagagacaccgctctccaagaaaaactctgatg

SEQ ID NO: 136 - DNA, 371 bp, Spodoptera frugiperda
  misc_feature (1)..(371): Rieske
attgagatcaagctgtctgaaatccccgagggcaagtctgttaccttcaagtggcgtggtaagccgctgttcatccgtcacagaaccgaaaacgagatttccaccgagcaggccgtgcctgcgtacccgtcgccaacgccggagacttcggtggctactactgcccctgccacggatcccactacgacgcttcaggccgcatccgcaagggacccgccccccttaacctcgaagtccccccacacagctttgtcgacgagggcctgctagtcgtaggttaagtaccccgacttctcggcttaccgccgcaaggagacccaggaaccgaccgcgaaggccgccgaaaatgttgatggacgtcaatccttcac

SEQ ID NO: 137 - DNA, 501 bp, Spodoptera frugiperda
  misc_feature (1)..(501): Duox
acacgtgctactttatgcgctctgtctcgtacacggcctcgccaggctcactggagctcctcggttctggatattcttcttgggacctgctattatttatacacttgataaggtggtttccctacgaactaagtatctagcactggatgtattggaaacagaaatgttaccatcggatgtgattaaaataaagttctacagaccaccaaatctaaaatatttatcaggtcaatgggtgcggttatcttgtacggcgttcaagaaggaagagttccactcgttcacattaacctcagctccacacgagaacttcttgtcttgtcacatcaaagcacaaggtccttggacgtggaaactcaggaattacttcgatccctgcaactttaatactgaagatcatcctaaaatcaggatccaaggtccattcggtggtggcaaccaagactggtacaagttcgaggtggcagtgatggtgggcggcggtatcggagtcacgcccta

SEQ ID NO: 138 - DNA, 427 bp, Spodoptera frugiperda
  misc_feature (1)..(427): Domeless
gtatatgtgtactggaaacagctggaggagtatgaagaggccatataaagttgtagctacaacaggctctaaaaacccacagactttgctgccagataagaacaaaagtttgagtaccatttggtccactaatgcagtcggttcatctgtaaacagcagtcatctttacattccatctaaatatgacagtgaagttttaagtgtatcatcttttacaaaacttgcttatgaaaatggcacatacaaattatcttgggttggtgtcttgatttaccaagagacagtagatatcaatttgcaatatcagccaacagtgggtctaaaacaagtggtatgatgtatggcttccctgtgaaagtgaatcatgatgctccagggaaaacatttgtccaaatcacttggacaatgtcttgtaccttacaggaag

SEQ ID NO: 139 - DNA, 136 bp, Spodoptera frugiperda
  misc_feature (1)..(136): PPO
gtacttccgcgaggacatcggcatcaacctgcaccactggcactggcacctcgtgtacccgttcgactccgcggaccggtccatcgtcaacaaggacaggcgtggagaactcttctattatatgcatcagcagatc

SEQ ID NO: 140 - DNA, 449 bp, Spodoptera frugiperda
  misc_feature (1)..(449): TAK1
gggcgtttggcgtagtatggaaaggtttgtggagaaacacactagtagcagtaaaacacattaattctgaggctgagaagcgggaattttcaatagaagtacgacatagtcatggagtacgcggagggaggctccttatacaatgtgctgcacaaccgccccaaacctaaatacaccgcagctcatgcggtgtagcatatctccatgcaatgaaaccaaagccattgatacacagagatttaaaaccgccaaacttgttacttttggaacggctgcagacaaagctacttacatgacaaataacaaaggaagtgctgctggtagacataatgtcagcgctgtgcgagttcttccccggcgcggatacgcccattaactacgacgactgcgaggacgaggactcggagtattccgaagacgagtacatgcaatacgacacgcaggacagc

SEQ ID NO: 141 - DNA, 218 bp, Spodoptera frugiperda
  misc_feature (1)..(218): Dred
agaaggactataagaggataatagtggagagttcagacagtgagaacagttctgtggaggaggtggaggacacgacggagggctatgagcggttgcagccacttatgtcagatagtgtagaagacgaggcgctgggccgcgctcggtacgggcccaacacgccgcagttcttcgagggcaccaggacgccatcaaggagtcctgtctcaaacctgcca

SEQ ID NO: 142 - DNA, 430 bp, Spodoptera frugiperda
  misc_feature (1)..(430): FADD
aaacttccaaactctaacgatgtgctaaagaaaatagcagactatgaaaaagaacatgttcccagggaatatgtaaactattatgttgcgaaaccacaagatctcaagaaaaaagaatctgaagacagctatattagtaccagtccattatcaaatatgagtgaaagaaagaaacagagaatttttgacacaattactcaagaaattggtagtttctggcgtgatcttgccaggaatttgcaaatacgagaatgggtgattgacgaaattgattttcaaaaccaaactcttcatgtgaaggctacaaaactactgaaagaatatgattctaaagctgatccacaaagatggtttttcattctatgtgaagcattagaaaaaagccgtagaaaggatctagtgagatctattcagaatatcatggcaatga

SEQ ID NO: 143 - DNA, 478 bp, Spodoptera frugiperda
  misc_feature (1)..(478): COPI beta coatomer
attctgactacgtcaggtgcatcgcgatacatcccacacagccatacatcctcaccagcagcgatgacctattgatcaagctgtggcatgccagcaagtgttcgagggccacacacattatgtgatgcagatcgtcatcaaccctaaagacaacaacacattcgctagtgctagtctcgacaccaccgtcaaagtatggcagcttggctcttcaatttccaacttcacattagaaggccacgagaaaggcgtaaactgcgtcgactactaccacggcggcgacaagccttacctcataagtggtgccgacgatcgtctcgtcaaaatatgggactaccagaataaaacatgtgtccagacattgaaggcgttgccagaaggcacagagataaaagatggggagcgggttccagtgatggcgaaggacatgggatcctgtgagatttatccacaaactatagcacacaacccgaacggt

SEQ ID NO: 144 - DNA, 419 bp, Spodoptera frugiperda
  misc_feature (1)..(419): Cactus
cccgtgcccgagcctgctagtgaggataagaaagtgaaaagtgtaagtgcctgcagctcactgacacacagaccccacacatcgccgtatcacctcctgagcagaagaacatcccaccaatcaccctattcttcacgccggacgaacagggagatacacaattacacatagcggcagtgcacggatgcgtaaaatcagtagcaacactcataagaatatgtccgaacaagatgttttagacaggctaggagaaacagccctacacaaagcatcgacaaaaggcaatgttgcctgaattcccatcaaggaagctaactacagtactgaatcaaaagaattataatggacaagcgtgcgtaagcggggcatctcgtcgcgctacagaccctagtgttctatggagccgatattaaagcaaa

SEQ ID NO: 145 - DNA, 322 bp, Spodoptera frugiperda
  misc_feature (1)..(322): IKK-?
ctttctgagaaacacagagcgcgatggacgaaggaagtggaaatgttacagggatgccgcttcgtcaaaggactcgagcgcgccaatccatcgggcctaccaattctttgtatggagtactgcagcggtggtgaccttcggcaggtgctcaacaaaccagaatcatgtgcaggcctcaaagaacaacaaattagacaaatactcagtgatctcagatgcgctatgcatttcctacatcagaacaaaattacacacagagatctcaagcctgaaaatattgtgtacagagtaatgtagctgtgcaaggccaaagaaaggtaat

SEQ ID NO: 146 - DNA, 476 bp, Spodoptera frugiperda
  misc_feature (1)..(476): Tube
tctgtgcccaacatatacagtgttatagataatgctatattgacagacaaaaatctagttcagtttgattacagtgaattagaagctataactaacaacttttctgataactttgctgagacacctgttggacctgttgggaaaataggaagtggtggttttggagaggtttatgttggtagacacagaaaacatggtcttctagctataaagagagtgagaatgcatttccagataagctgtgaagttgccatgaaggtgtttaacactgaggtaaaggctctgtctcttctaagacatgaaaacattgttcccatctttggatactctatagatggtattacaccatgtattgtttgtgaatacattgatggtggctcactgtcatacaatattcaagaaagagtactgcaagtgaatgaaagaatgaatataataaaaggcacagcagaaggcctgaagtacatccatcacag

SEQ ID NO: 147 - DNA, 236 bp, Spodoptera frugiperda
  misc_feature (1)..(236): Imd
ggcctgaccatgactatatggattacatatcaaaaaaccttggcaaatcgtggaagaatttcttcaggaaacttggttacacagagggaagaattgatactgcccagctagatgctgtacaccgtggttacagcataagtgaggctcgatacaaactactatttgagtgggtgaacaacgaggatgatgcaacgctgggacaactggctactctattgtggcgtgaaggagagcga

SEQ ID NO: 148 - DNA, 185 bp, Spodoptera frugiperda
  misc_feature (1)..(185): PBAN
atgttccgttctgttatcttctttgctgtttctgttagctgtgtcatcgctaactctaatgaaattaaggatggtggatcggatagaggagctcacagcgaccgagcaggcctctggtttggacccagacttggcaagcgttctttgaggatatctactgaagataacagacaagcattcttcaa

SEQ ID NO: 149 - DNA, 488 bp, Spodoptera frugiperda
  misc_feature (1)..(488): beta-1,3-glucan recognition protein 2
gaagctaccagaaggcagctggcttatacctgaaatcaacttggaacctacagaacatgtgtacggatccctccgctatgaatcaggactgttgccaagaagctgtgcggcggccccatcctatctgactcagatcccttcagatccttactgatgaaggaaaagattggaatcgacaactggaataaggacttccataactacaccttgatttggagacctaatggtcttcaactctttgtggatggtgagcagtatggaactatcgaccctggcgatggtttctttaacaccgctcggcagcacgcagtccctcatgcttctaattggttgagaggaactgtcatggcgcctcttgacgaaacgttctacatatctcttggtcttcgcgcgggaggtgttcatgattttgctgatgatatccctgacaaaccctggaggatggtacaatgctaacctgaaagtggactatatcaaagtttttgcgt

SEQ ID NO: 150 - DNA, 297 bp, Plutella xylostella
  misc_feature (1)..(297): Dred
gcgcgctacggacccaacacgccctcattcttcgagggaaccctggcggacgccatcaaagaagcctgcttgaaacccgctaaagatcggaagctcctcgtgctgtacggctgggacctcacgcacgcgagcaacaaccagatgctcctaacctcaatagcgaacgcgctctcgagcggttcgcggcggctcgagaccaggacgcgaaggctgaacacgagcgagaggcgaggcagcgggtgaagagagagcaggatgaagcgtaccagcaaagccttgaggctgacagagctaaag

SEQ ID NO: 151 - DNA, 433 bp, Plutella xylostella
  misc_feature (1)..(433): TAK1
gaggctgagaagcgagagttcgcaatagaagtgagacagttgtcccgagtgtcccacccaaacatagtgcgtcactgtacaatgtgctgcattgtcaccccaagcctaagtatactcctgcacatgctatgagttgggctctacaatgtgccgagggtgtagcatacctacatgcaatgaaaccaaagccgctaatacacagagatttaaaaccaccaaacttgcttcttgtgagcaatggacagagactgaagatttgtgattttggcacagcggcggacaaggctacatacatgacaaataacaaaggcagtgcagcatgcacaaggtgcccgcccggagacccagcatgaacaaggtagtagaaataatgacagccctcagcgaattcttccccaaagcggacactccactgaactacaacgactgcgaa

SEQ ID NO: 152 - DNA, 490 bp, Plutella xylostella
  misc_feature (1)..(490): PPO
tattagtgacatggagcggtggaggagaaatgtggaggaggccatcgctactggacaagtgcgctggcacgcgtgggtcgacgacaccttccagaagcacaaggagtccgcctacgtgcgcccctacacgcgatccgagctggaaaacccaggcgtgatggtgcaatccgcccgcatcgagacaaccgggtccaaccaggccaacacgctgaacacgttctgggctggacttctccaaccgcgggcccgtgtacgcgcgctttacccacctcaaccaccgccccttcagatatgtcatcgagatggaccgcttcgtcgtgccactgaatggcggcgccaacacaatcacccgtcaatccacggagtcctccgtcaccatccccttcgagcagaccttccttctgcgggctccgagaccgattatacccggaccgacgccccatgggcttccccttcgaccgcccctctcgctctgtcaccaacatcgagg

SEQ ID NO: 153 - DNA, 483 bp, Plutella xylostella
  misc_feature (1)..(483): Domeless
gccaatggcccaatacggataaaatatgcaacaacatttgtaactactcctgaaggtgtaccctcaagtcctgtcaacatcactgtatcaaacattactcatgactcagtagtgatttcctatgatcctccagtaatgaagaatggttatattgtgaaatatgcaatttacaactatggagagatattttacaatgacaccatgagtataccaaatgaatcagagagctctagaagaagatatgtaaaattggataaattagaaaccatgatataccaggtgcaaaaagtgaaaaatgacgtcccacaaatttacgagacgccagccaatacattctcgattgctggtccttgcgaaggcatcataaaatatcgcgtcagagaaacaatcttgccattcttgttcctctttatatttttgatcggcatgacctttggatttattaaactgtacaaaaaacaccgctcaatgaaagatattaaa

SEQ ID NO: 154 - DNA, 490 bp, Plutella xylostella
  misc_feature (1)..(490): Duox
tggtgctattctcccgcggagcaaccgaagacaagctacgcataatattcgacatgtgcgacagcttccacattgagccttccatggagaatagaagaaactggtgcctcttaaaatgggattaccttacaacattcctagaagagaaccgtcaaaacatcttctacctgttcatattctacgtcgtcaccatcggtctgtttgtggagaggttcgctcactactccttcatgtcggaacacttggacctgcgacacatcatgggcgtcgggatcgccatcaccaggggctcggccgcccctctgtccttctgctacagtctactcctgctcactatgtccaggaatttacttactaagcttaaggaattcagcatccaacagtacatcccgctggactccagcatccagttccacaagatcgtggcgtgcaccgctctgttcttctccctcctccacaccatcggccacatggtcaacttctaccacgt

SEQ ID NO: 155 - DNA, 392 bp, Plutella xylostella
  misc_feature (1)..(392): Rieske
caccgcgacattccgcacccaaacttcaacaactacaggaagaaccagttcaaggacgtcaacaggagcgaattcgggcaaggagacgagaagaaaggcttgctggcgctcgctactgtcgagatcgacatctccaagatcgcggccggcggctgcctgtcctacaagtggcgcggcaagcccgtgttcatcaagaaccggctgccgtccgagatagaaatagaagcgagcacgccgtcatcggcatctgcacgcacctcggctgtgtccctatccccaacagtggggacttccccggcggcttctacttccccccccccggcccccccagccactacgacaacgtcggccgcgtcaggaagggacctgcacctattaatctggaagtgccg

SEQ ID NO: 156 - DNA, 180 bp, Plutella xylostella; identical to SEQ ID NO: 42
  misc_feature (1)..(180): Voltage-gated potassium channel

SEQ ID NO: 157 - DNA, 492 bp, Plutella xylostella
  misc_feature (1)..(492): Rop (Ras opposite)
gccgattgagaatgacgtgtacagatacgacgcgtcgcaaggcggccccatgaaggaggtgttgctagacgagaacgacgagctgtgggtggagctgcggcaccagcacatcgccgtcgtgtccacctccgtcaccaagaacctcaagaagttcagcgactccaagcgcatgggcggaggtgacaagcagtcgatgcgcgacctctcgcagatgataaagaagatgccgcagtacctgcctgtgctgctcgaccaggcagtgaccaactacaacaagatgcgcatcatcgcgctgtacataatgtccaagaacggcatctcagaggagaacctcaacaagctggtgacgcacgcgcagctcgagccctccgacaagcagacgctgctcaacctcgccaacctggggctcaacgtcgtcattgatggcaatcgcaagaagcagtaccaagtgccgaggaaggagagaatcactgaacaaacctaccagatgtc

SEQ ID NO: 158 - DNA, 503 bp, Plutella xylostella
  misc_feature (1)..(503): RpII 140
acgtcaaatggacattgttgtgtcagaagtaagcatgattcgtgacataagagatagagaaataagaatctaatttggttggaagtggtgtggtggaatacattgacactttggaagaagaaacagtcatgatagctatgagccctgatgatcttgctcaagtgaaagaatatgcctactgtaccacttacactcactgtgagattcatccagctatgatattgggtgtttgtgcatccattattccattccctgatcacaaccagagccccagaaatacctaccaaagtgctatgggtaagcaagctatgggtgtctacattaccaacttccatgtacggatggacactcttgctcatgtcctgtattcccctcacaagccacttgtgaccaccagatccatggagtacttgagatgatctgtgttctatcgatcctacaaagactctgaatccaagagaataggagaccaagaagaacaatttgaaaaacccactaggcag

SEQ ID NO: 159 - DNA, 237 bp, Plutella xylostella
  misc_feature (1)..(237): Proteasome beta
acaggctgcttcgccgacgccacttcactcgtaaaattcgtcaaaaccaacatgttaatatacgaacaagaccaccacaagcccatgtcgatagcagcactcgcgcaaatgctgcaagtcatgctgtattttaaaagattcttcccgtacccgatgcccatgaagactgctatctcactcatcaaagacgtgttcaaggcaaatacacgtcggtgactgcgtcaaaattatgatcat

SEQ ID NO: 160 - DNA, 444 bp, Plutella xylostella
  misc_feature (1)..(444): beta-1,3-glucan recognition protein 2
tcaagtttcctgaggagcctgactatcccttcaacctgtacaccacgaccaagaccctgacactcgaggacggagacctcaacatcaaccctctactactggagaagaatggtctatgaggagctggacttgaccaacacgtgcaccggacaagtaggcaccaccgagtgccagcgcaaagccatcggggcaaacatactgcctcccgtcatgaccggcaaagtaacaactaaacataaattcaacttcaaatacggaagagttgaagttcgagcgaaattaccagctggaaattggctacttccagaaataaacctggaacggtcggtgatggcacccttggatgaactgttttacatcagcctcggagtccgagtgggtggcgtccacgatttcccggacaggttttccacctggtatgacagcagcatgaaagtagactac

SEQ ID NO: 161 - DNA, 293 bp, Plutella xylostella
  misc_feature (1)..(293): PBAN
agagccatgcacctcgcgccggacgctgacggacaagcagtatacaggatgctcgaagcagcagacgcgctcaagtactactacgaccagctccagtattatggggctcaggctgatgatcctgagactaaagtgacaaagaaggtgatcttcaccactcgggcgtcggaggctcaaggactcggggctggcgccgcctgatgaataccgcaccccggagctgctggcccggctcggccgcggcggcagcatgaccttctcgcctagactcggacggaaccttgtttacgatt

SEQ ID NO: 162 - DNA, 450 bp, Plutella xylostella
  misc_feature (1)..(450): Imd
gaaactattgcaaaaagtttcaagtctgatgcagtcccgaagccacctagagaaccggtagagactacagatacatcacaaaataataccgaaaatcagccttacaatgtcgaagaagaggaaatacccgaaccagaaaagcctaagaaagaaaaaaagaatcccaagcctaccaaaaaaaatttctttaatcgtgacaaaactaacaaacacgacgatacccgcaaacatacaaaatccggaaaggaccagacatcaattaatactcaagcaactggtgatgtaatccatgtggtaaattccaaagatgtgcaggtcggccatcagtatgtgtacaacatgggaactcccggagctaactcacaaaagaataacccatttgatgatgaagaaacagtagaaaagacaaatctaataactctggtcatggaagcaaaaattatgctggaa

SEQ ID NO: 163 - DNA, 497 bp, Plutella xylostella
  misc_feature (1)..(497): Tube
gagccgctgatgccctagctgcacttttacaagaaaatgaaccatcaagacctcagcatggtccagcagcccagatagacattgacatatcaaaaatgctggaaagtgactctttaaaaaatttcaacaccaccaactcagtaaagagggaatactttgagaagacgacacaacagctacagaggcctaccgatgagcttgagaaaatgattggagaacaacccacacatggcgcctgaaggattttcaggtactatcactcagaaaatagacatttacagttatggcatagttctactggagttactaacaggatttaaggctattattgtaaatagtagtgaaaccataaatatccaactttatattgaagaaaactgtgttgacaatgatataacaccacttttggatccagtagtcgagaattggacgaaagcaaatgaaatttacaacttatccttaaagtgtttggaaaggcagagaaaaagtagaccatc

SEQ ID NO: 164 - DNA, 456 bp, Plutella xylostella
  misc_feature (1)..(456): IKK-Beta
tttggtctagtggcctttgaaattctttgtggagtgaggccgttccttccaaacatgccccctgtgcagtggatgccacatatcaaaaagaaggcacatgagaatatttgtgtctatgaaacacaccacggtgacattgagtattcagatgaaatattccctgaaaattatatttcaaagccatttaaggcactgctggagaaatggttcagggtggcattagaatgggatcctaagttacggggaagagatgctccgtctaaagttaccttcaacctgcctacagaggagaagggagaggcaagcaaagtgatattgttcagcatgttagaaagtattctggccaagaagattattaaaatattttgtgtctacaacctttcattcattgcatatgaaattgatgacaacacttcaatagcaacattaaaaacttggatatggaaagacactcag

SEQ ID NO: 165 - DNA, 438 bp, Plutella xylostella
  misc_feature (1)..(438): FADD
atgactttaactgattactgtgaattaaagcaaaaaattgtgatcggtgttggtgaaagcgataagcatggacaactcgtaaacatgttaaagaatttatactaatagcgagcaacttttggacagaatcaaacattacgaaacaacacatattccaaaaactaacctaaattattatgctcaagctttttgagcacaaaccctctaccaaccactatgagtgccagaaaaaaggaacggatatatgcaagaataacagaaggaattggatccaattggaaagacctggcacgaaatttgggtatccgagaatgtagaattgatgaactaaatatagaatacccaactgttatatctaaagctaccaaagttttagaagagtatgagacaacacgcagaagagatttgagcagaatgattcgagagattgaaactatg

SEQ ID NO: 166 - DNA, 296 bp, Plutella xylostella
  misc_feature (1)..(296): ATF-2
gatcgccgccaccaagtgtcgcatgaagaagcgagagcggaccgtcaacctggtcactgagagcgaggtgctcgagaaccagaacatagacttgaagtcacaactcaaggacttggaagtgcaaagacggaaactcatcgacatgctctccctccacaccgcgtcctgcgtcaagaacaactccaacaactccaaccagcagcagtacaacatgatccggccctacgaatctccaacccccttccccgcttgctacgagacttcctccccctacatccgaccagagtccgcgaaca

SEQ ID NO: 167 - DNA, 346 bp, Plutella xylostella
  misc_feature (1)..(346): Cactus
atgagtttcaagaaggatttcgacacctcaaagaagatccggacctctcggagtgtctgtcgagtgttaagcttagtgatagtgcagtgtacacacccacctcgcagaccacccccacagtcactataggtgatgagaaaactcatgacatcccgcccctcgccatcctgttccagcaggatgacgatggagacacacaactacacattgcagcggtacatgggtgcgaaaaatcagtaggaacattagtaagagtttgccctgacaaagattggctaaatgtaccaaatgactttggacagaccgccttacacttagcagccatgagtgggcatgcagtagtcac

SEQ ID NO: 168 - DNA, 463 bp, Plutella xylostella
  misc_feature (1)..(463): p38
atgccgaggtatcacaaagtggaaattaacaaaacagaatggatcgtgccagaaagatatcaagcgcttaggcaagtttgctcatctgttgacaccctgcataatatgaaagtggctatcaagaagttggcccggccgtttcaatcagctgttcacgctaagaggacctaccgtgaactccgcatgttgaagcacatgaaccatgagaatataataggtttactagatgtgtttactcctgagaagtgtctggaagtacctggtgactcacctcatgggggctgatctgaacaacattgtccgcacgtctatcagatactgcggggcctcaagtacatacactcagcggggattattcatagggatttgaaaccatcaaatatagctgtgaatgaagattgtgaactaaaaatcctcgactttggtttagcgcgaccaactgaaaacgaaatgacaggatatg

SEQ ID NO: 169 - DNA, 428 bp, Plutella xylostella
  misc_feature (1)..(428): COPI beta coatomer
gtgttcgctactagcacaggtgacaaagagctgatgaaggagatagcagacatggccctgaaggagggtcagaacaacgtggcattcctcgcgtacttcacactgaacgagctggagacctgtctgaagctgctcatagacaccgacagactcgccgaccccgagagctatgagaacctcttccctgaattcgccgaaagtctagaactagagaagtaccaggcagaattcggctacgagtacagttccaacctcgcaaacattccagacaattacaaactcagcaatattgacagagatttggctttagagaaagccgaagcagagaaactcggcctataccaccccagcgcttcaagccacggaggccaagctgaagcgcaagaactccctggacatgatggaggagctagagaaggagctggatg

SEQ ID NO: 170 - DNA, 387 bp, Plutella xylostella
  misc_feature (1)..(387): Hopscotch
gaatacgacgtgtactatctagatgtatgcaaagacaataaaccaaatacctataggatagactactcagacggccaattcacgttgatggataagagttatgcgaacatacgacaattgctcgacgactaccgaagtaaagacggcaagatttacctggactacgtgtcgcagttgctactgtgtcgtgagaaacaaaagaaaggcgagcacattgaccccaaccagctaccagagatcctcagaaacaatcagagttccctgtgtctgaaaccaaacgacatcttcctatatccagattatgttatctaagggcatttggaagttagacgagcagaaaaaattggacattgccttcaaaactctgcacaaagacaaaatcatgta

SEQ ID NO: 171 - DNA, 450 bp, Spodoptera frugiperda
  misc_feature (1)..(450): dorsal
aaacgtgatacggatgacgagcgcgctccccccttgccccccaaacgcgtccgtaaagctgcatctaccgagcctttcaaaaccagccagacttcggtcgatagcatcttaaaaccgggtcgacagatacccgtcacccgtaacccagaccaattgaaaataaactctgagatgactgtagccaaaagcgaacccgcattgcccccggtcaagaagcgttcgttcttttcacgcctatttaggagaaaggagaagtcccctgctcccagtgttaaatctgagggtaggaaagaggccaagagtaaaccagtgggtcgatctgtgagcagtgtctcgggggtccgtccttccaagttcaagtcgtcggtgtctcacacctcgttgaaagacatcagaattcgatgaaaccagttgctattactcgccggtagatggcagcaaatttcaaaa

SEQ ID NO: 172 - DNA, 481 bp, Spodoptera frugiperda
  misc_feature (1)..(481): Kenny
ggaaggacaatcaagaagttaagaactctattacgtttaacgtaaaaactgtgccaggaatactctatggagcatctagaacgaggaagacagttgtaaaagatcaaccatggaaggaaaatgcgttaatcatatttgaaaattcgtttgtctaccctttcattcatgcgaataataaatacaagtgttttgcttgtcccaaaacgtttttggacgcagtttctttaaaaaatcatacgacaaatgatcattccttaaaagattttaaaaggcaattgaataataaaactagagacaaaaatgtgaaagttgatgttacatatctacaatgtaaaatatgtttgcagacgctaccaaatataaacaatttaaaactacatttgaaggaacacggcaagaatatagacatggaatctgaagattatttgataccgttcaagttgagcggtgataattttgaatgtcaagtctgtggggaaaa

SEQ ID NO: 173 - DNA, 386 bp, Spodoptera frugiperda
  misc_feature (1)..(386): Ankyrin
aaatatctgatagatgcaggtgctaatgtgaacagcgaagagatacatggatatacgcctctttgtgaagctgtatggcaaaagtatgcagttggtgtagaacttttattgttatctggtgctagaatcactcactctcataggcttttacataatgcaataatacaaagacagatggaaatagtaaaaatgcttactgcttatggtgccgggataaacttgtataatgacaatggagacacgccactgcttttagcggtacgactatctcagcccgcaatcgctaaaatattattatgtaaaggtgcaaacgctaacttgttaaacagtataacaggtgccaatgcattacatatagctgttgaaagtgtggattcccatgaaga

SEQ ID NO: 174 - DNA, 430 bp, Spodoptera frugiperda
  misc_feature (1)..(430): caspar
atggcagaaaacagagaagaaattctagcaaattttcagggtataacagccatagaagatgttgctgaagctatttaccacctagaagaagcaaattgggacttgcttgcagccataaaccgagtgatgccacaggacgggaacagctcagccgccaatgacaatgacacacacgatgttgagatgatagacgatgatatatctgtgataactccaaaaactcacccaccagaccgggaagacacaaatcaagcatccacgtcaatgcatgtaaattttaatgccgctcccaatcccttcgtagaactacaggttcattgtaataataagatacatgaagtcaaaatggctgggagcgctactgttgctgacttgaagaaggaattggagaagaaatgtggcgtgccagtatgtcggcaacagttgtcgg

SEQ ID NO: 175 - DNA, 475 bp, Spodoptera frugiperda
  misc_feature (1)..(475): duf
atgttccattggctaattaaaaccttctttacaggtcctccgaagataatttcaaatcagactcagtttgggtctcaaggcgacacagtgaacattgaatgtgctgccttcgcagtgcccaggatcgacaatattatctggacttttgatgggaaggagatcgattctatacatgatcaggactacgcatttttagaagagttacaatcaggaggtgtagtgaactccacgcttatcatcagagagagccagtctaaacatttcggtgtctacaaatgtaatgtctccaatgactatggcagtgataccatggaaattatattaaggcctaacaaaacattcccgctcctcctaatcctattcggagtgacatcaggcacaataatggtggcagcagtgatcatgctagtgatactgtgtcaaaggaagcagagaaagaacaaacaaacacaggtaacagaaaaaccagatgtca

SEQ ID NO: 176 - DNA, 450 bp, Spodoptera frugiperda
  misc_feature (1)..(450): htl
atgtcactgtcactgtcaacgatgttgaggataaagtcattcgattacacggatgtaggcgtatttgtatgcaagttcgacaatgatgatgccacaaaattatcacttaagctcgaagtgaagccaaatccttataacccagataatggacgtgatcaccaaacagatataacacaagctgtgcagccagaagccttatcacaagttgtcaacaaaacacaagaagaagggctttctttaccagacagacgatatggcaaagaagatgacgatgaaagagcggagaaagatcatccaggttatggtcatatagatgagaaacaagattatttccctcctcgattcaagcatcccacgaaactatattacatggatatgaaacctgcagggaactcgataagaatgcgatgcgccgctgaagggaaccctacgccgaacataacttggtac

SEQ ID NO: 177 - DNA, 381 bp, Spodoptera frugiperda
  misc_feature (1)..(381): axed
atgctcaggcagagatggccctgacttcagacggttttgttgacatagatgtgtcaacactagaatcagtattagcgagggaaacactcaattgcaaggaaatcaacttatttgaggcagctttagcttgggcacatgctgaatgtgtgcgcagagacatagatccaacaccaacaaacaaaagagtcatgttgggaggtgccatatatttgataagattcccaactatgtcactcgaggagtttgctaacagtgctgctcagattggtattttgaccccacaagagactattgacatatttttacattttactgcatcaagcaagccacaattgtcttatccaattaaggcaagagctggactaaaggctcagatctgtc

SEQ ID NO: 178 - DNA, 480 bp, Spodoptera frugiperda
  misc_feature (1)..(480): Rbm24
atggccaataacgacaactttgcacaagatgttactgataatcaactaaatggaaatgccgaaaatggtggtggcgatacgcaagaacataatagtgccgaagcccctgggcgtgatgatgacagaaaactttttgtcggaggcctgagctgggaaaccacagacaaggagttacgtgaccacttcagtgcatatggtgagattgagagcatcaatgtcaagactgatccaaacactggcagatcaagaggatttgcctttattgtgttcaaggcaccagattcaatagacaaagtgatggctgctggagagcacactattaacaacaaaaaagttgatccgaaaaaagcaaaggctagacatggaaagatctttgttggtggtcttagcagtgaaatatcagatgatgagatcaaaaacttcttcagtaattttggaacaataattgaagtcgagatgccctttgacaaaaccaagaat

SEQ ID NO: 179 - DNA, 350 bp, Spodoptera frugiperda
  misc_feature (1)..(350): pirk
atgaagaagtactcgatcgttggaaacaagaagaaagtgacgatggaagtcaacccaacgcagctgaagatcgttgggaacaactgcatcgtgagggtctcagtgaaccacggagagatcgaagtgatcggcaatgactgccgcatcgaagtgtccgataaccatggagttattaacatggtgggaagtggtggaacagtgattatcagcaagcgatggaaaggtgaccgagtgcagttggtcggtaccagctgccatttgttcgtggctgggaaggagaggagtacagggtacgaggcccaactctctcccttcagcaaggacttggatgacgtcattgaatccatctt

SEQ ID NO: 180 - DNA, 450 bp, Spodoptera frugiperda
  misc_feature (1)..(450): bendless
atggcagccctaccacgtagaataatcaaagagacacagcgattgatgcaagaaccggtgccgggaatcagcgcggtgccaagcgaaacgaatgcacgttatttccatgttatcgtcactggtccagaagactcgccgttcgaaggaggactattcaaattagagttatttctgccagaggattatcctatgtcagcgcctaaggttaggtttataacgaaaatataccatccgaacatagatcggctgggtcgtatatgcttggacatattgaaggacaagtggagtcctgcactgcagattcgcacggtgctgctctccatccaggcgctactgtcagcaccgaaccctgacgacccgctggccaacgacgtggccgagctgtggaaggtgaacgaaagcgaagctatccggaacgcgaaggagtggacgcggagatacgccatggac

SEQ ID NO: 181 - DNA, 481 bp, Spodoptera frugiperda
  misc_feature (1)..(481): shadow
tgatcgctgctggtgatacgacgtcttataccacaatatggacattatatttattatctaagaacaaagatgtgagacaggaactatttaaaagaaattctattataaactatgcgataaaggaatctatgagattatatcctgttgcaccgtttttgaccaggattctgcccaaagaatgcatcttcggagcttacaaacttaaaggaggcactccaataatagtttccatttatacatctggaagagatgagcaatactttagtagagcaacagaatacctaccttatcgttgggaccgcaatgatgaaaggaggaaagatcttgtgaaccatgtgtcttctgcttccttgccatttgctcttggggcccggtcatgtataggtaaaaaactggcaatgctacaaatgacagaacttataactcagatggtacaaaactttgattttgaatgtataaataaagatgaagttacatccaa

SEQ ID NO: 182 - DNA, 401 bp, Spodoptera frugiperda
  misc_feature (1)..(401): ABCH1
gcggtcgaggacggtgaggcctggggagcgctctacttcaacgagaattatactgactctcttgtagcgagactggctttggctgacactgctgacaacgaaaccatcacgtcttcggaagtacaagtgtggctcgacatgtccaaccagcagatcggactcatgctcaacagagacatacagttctcatacagggacttcgctaaggacttgctccaaacatgtgaatacaatccaaagctcggtgacatccctatcgacttcatggatcctatctacggcaacaagaacccatccttcaccgacttcgtagctccgggagttattctgacaatcgtattcttcttagccgtcgccctaacatcatcagcgctgatcgtggaacgtatggaaggtttgct

SEQ ID NO: 183 - DNA, 466 bp, Spodoptera frugiperda
  misc_feature (1)..(466): Dumpy
ccgaactgtcgagcagaatgcactgtcaactcggactgtccaagcactaaagcctgcataaaccagaaatgtcgcgacccatgcctgggctcgtgtggtcttcaaacagaatgtcaagtttatcaacatgctgctatttgtagctgcagagagggctacactggaaatccatttgaaagttgtcatgttaaacaaaaaattgaacctgtacctgcagtttacgacaaatgcaacccaagtccttgtggagcaaatgctgtttgcaatgatggacaatgcacgtgcatgcctaacttcttcggaaacccatacttaagttgtcgtccggaatgcacaaacaatgctgactgtcctcagagtgcaacgtgtgtcaataataaatgtatcaacccttgcaccaatctgtgcggacagggcgcagtgtgtgaagtgtataatcatattccaatgtgtatctgtccatcaa

SEQ ID NO: 184 - DNA, 486 bp, Plutella xylostella
  misc_feature (1)..(486): dorsal
cgcactgccgcccgtcgtctccgatgtgatatatgacaagaaggccatgagtgacctggtgattacgaggctgagtcattgttctgcgcccgcgcagggcggcaagcaagttatattgctgtgtgagaaggtggcccgtgaagacataaccgtaaccttcttcgagaagtccggcgagcgcgtgacgtggcagggggacgcggcggacgtgttcgtgcacaagcaggtggccatctgcttccccacgccgccctaccgcgacccgcacgtgcaggaccatgtgcaggcgtacatccagctgcgtcgtccgacggacaacgctacgagcgagcctctgcccttcgagctgctcccgtccagcgcagatccgaattcagcccgccgcaagccgccgccggacctctcgctgctgacgctactgctgcaggaccccaagcgtgaccccaacaacaaccagcacaccgactccgtcgtcagctccacgag

SEQ ID NO: 185 - DNA, 456 bp, Plutella xylostella
  misc_feature (1)..(456): Kenny
ctaaatgcaatggtgccggtctaccgataactgaaacacctctgaaagcggctgacattgaggaggccatgaaagatctgtctctgaccgcaaatatggctttcaaggctcatttcaagcttggtgattgtccgtccccagccagtctgatggcagccagcaccatagtatccgaagacaagaccacggagcagctgcagaagagattcggggagatcctcgacgaaaacgtaatcctcaaagagactttaaagcagaacaacgagtctatgaaggaacagtttctgctcatagcgtcctgtcaggaagacatgctgaatacgcacaagatgcatcgggagaagtttgaggagacgcgcggattggtggaaaagttacgccaagagaacaaaaaactcaagatggagatgtctcgcctatccgactctacttcaaactcgcagcccaacagtgtca

SEQ ID NO: 186 - DNA, 451 bp, Plutella xylostella
  misc_feature (1)..(451): Ankyrin
gcaggaggaccgcgtggccgtggcgcagctgctggctaagaatggggctgagatggacatagagactaaaggcgcgtacacgccgctgcacgtggccagccactacggacaggccaacatgactcgctttttgctcgacaacgacgcttcagtcaaggcacagactacacatggctacacagccctgcaccacgccgcccagcagggtcacatcaacatcgtcaacatactgctggaacacaaggctgacgccaacgccgttactacgagcggccaaaccccactcgacatagcctggaagctgggctacgtgacggtgatggagaccctgaagggggtgtcggaggtgaccacgccccccgcgcccccctcccagctcaagtacaaggtggtggccccggagaccatgtacgagaccttcatgtcagactcggaggaggaaggaggagaa

SEQ ID NO: 187 - DNA, 480 bp, Plutella xylostella
  misc_feature (1)..(480): caspar
aacagttcagtggaagaagtagaggactcggccgacgggttcgtggccgaggacgacatgttcgtggatctcgtgcagtccgagcggttgcagcccttaatgtcagaagcggtggaggacgaggcgatcggctgcatagagttcgggtcgcggttccgcgcgcgctacggacccaacacgccctcattcttcgagggaaccctggcggacgccatcaaagaagcctgcttgaaacccgctaaagatcggaagctcctcggcgtgtacctccaccacgagcagtccgtgctgtcccacgtgttctgcgcgcagctgctcggctgcgagaccgtgctgcacacgctggcgcacaacttcgtgctgtacggctgggacctcacgcacgcgagcaacaaccagatgctcctaacctcaatagcgaacgcgctcggcccgatggcgtccatgacggtgcgcagcatccccgtggagcgtctcccg

SEQ ID NO: 188 - DNA, 430 bp, Plutella xylostella
  misc_feature (1)..(430): duf
gccgctgagataacgtgggtggacgggcaccaggcggtcatcagggacggtgtggagaccaaggtggagctgatgcccgacggacagcggttcaccaccaggtcgaccctccggctgacccccagcatggagcatcacaacctgacggtgacgtgccaggcgcagaacacggcagacagggcctataggatggccttcgtgcatgtcgaggtgaaatacgcgcctaagctgaccatgtccctgtcgtctcccgccgtcaacaacatgatcagagagggcagcgaggcccggatacgttgcgcggtggcggcgaacccccccgcgcacgcgtacacgtggtacctggacgaccaccccctcgtcggggactacacggatgagctgataatattcaacgtgacgaagaagctgaacaacgcggaggtgaagt

SEQ ID NO: 189 - DNA, 480 bp, Plutella xylostella
  misc_feature (1)..(480): htl
ggctggtacgtgtgtgtggctctcaacgggctagggaacaccaccgcgaaaggatacctcactgttcttgaatccttaccaccagaaaaagaaatagtggatcacggaaagcactctctactcatcaacatactgactgcggtactaggagccatgttctttgtagcggccatcatcgtcgtgatgatcttcaagaagctgaagagggagaagataaagaaacaactggcgatcgagacggcgagggcggtgatcgtgacgcactggacgaagaaagtgacggtggaaaaaccgccgatgaatggtgctacgcccgctgcggagcatctgctaatgccagtagtcaaaatcgaaaagcagaaactccaacaagtgcaaagcaacaccagcgactcaatgatgatgtcagaatacgagctcccagtggacatagactgggaggtgccgcgagagacgctggcgataggcaaggttctgggc

SEQ ID NO: 190 - DNA, 461 bp, Plutella xylostella
  misc_feature (1)..(461): axed
gttcccgatgtggaaccatcagcattcctcacattgctcaagtatttatattgtgacgaaattcagctcgaggctgacacggtgctatcaactctgtatgtcgcgaagaagtacatagtcccacatttagcaagagcatgtgtcaacttccttgagactagtctaactgcaaaaaacgcctgcctgctcctcagccagtctcggctatttgaggagccggaactacttcagcggtgctgggaagtgatagatgcacaggccgagatggcgctgacgtcggaggggttcgtggacatcgacgtgtcgacgctggagtcggtgctggcgcgggagacgctcaactgcaaggagatagccctgttcgaggcggcgctggcgtgggcgcaggcggagtgcgcgcgtcgcgacgtcgaccccactcctcagaacaggcgagccgtgctcggccgcaccatctacct

SEQ ID NO: 191 - DNA, 470 bp, Plutella xylostella
  misc_feature (1)..(470): Rbm24
actgctcatgtcttgagcgcgcaggcggccgcgcacgccgccgccaccgccgcggcgcaggcccaccatcagcaacagattgctgttcaacaaataatcaaccaccccacagaatccccgtcttcgggccggtccacaccggtgacgtcacaagccaatggctccgcaaccacaatctcaacgggcaccacttcaccgtctccgagcaaactctttgtcggaggcctcagctggcaaaccagttcagagaagctacgggattacttcgcaatgtttggcccggtcaccgacgtcttgatcatgaaagatcctgtcacacagcgctcgcgcggcttcggcttcatcacgttccaggaggcgtcctccgtggacaaggtgctggcggtgcctgtccacacgctggacggcaagcgcatcgaccccaagcacgccacgcccaagtcggcgccgcgccccgccaagacgaaaaa

SEQ ID NO: 192 - DNA, 351 bp, Plutella xylostella
  misc_feature (1)..(351): pirk
gaatccttcaggagtatcatttctacaactatctatgagaaatggaactcgacacagttcaagcagagcctacttacatcctatcaataaacgaaacaatctacacttggccaaaggaagtatggtaacgaaactcataatggaaggaaagaaagttattggtgttgaaatggaacgtttaaatcaaaagtataaaattttagccaaaaaggaagtattagtttctggcggggccatcaactctccgcagcttctaatgctctcgggtatcggaccggaagagcacttgaaatctttaaacatacccgtcgtccaggacttaaaagtcggctacaatctcatggaccatat

SEQ ID NO: 193 - DNA, 450 bp, Plutella xylostella
  misc_feature (1)..(450): bendless
cagcgatcggcgcggatcacacgggagatgaagaacttcgagaagcgatctccgtacggtatcacctgcatacctcttgagggggacaactacgacgtgttgcatgtgtccatgctgggcccgcggggctccgcgtacgagaagggcatgttccgactcatcatcaccatcccggacagataccccttcgaaccgccgctcgtgaagttcaagactccggtttaccaccccaacattgataaagagggcagaatctgcatggacatgctgaagatgcccccgaagggcgcgtgggtgccgaccatcacgctggagacgctgctggtgtcgctgcagaccctgctcgggaaccccaaccctgacgacccactcatgatggacatcgctaacgagtacaagaacgacaaagagatgtttatgaagaatgctaaagatcacactgagaaatat

SEQ ID NO: 194 - DNA, 441 bp, Plutella xylostella
  misc_feature (1)..(441): shadow
catcttcaaaagtacaaaaaagtatgcactttaatgaacttttatgtaaattttcggatacagtaaaaggaatttttgaaacgactacggcgctatttggattaccagttaatatctgtcaaaaattaaacctgctcgtctggaaagatttcaaggaatgtgttgatgaatctctcatattggcacacaaactaataaatgaaatgttggatcatagaaaccaaagtgatggtttgataaaaaaattaagcgacgaaaacataacagacgaaaatattataagaatagcagcggattttgttatggctgcaggagatacgacttcatatacgacattgtggacgatgcaccttttatcaacgcatagagaagtcacggatgaaatattacacaccaatggtacatacgtaaagaacgtaataagagaatcaatgcgactct

SEQ ID NO: 195 - DNA, 441 bp, Plutella xylostella
  misc_feature (1)..(441): ABCH1
tcctgaatttcacctcccgagggaagatcaaggcgctgatccagaagaacttcctgcggatgtggagaaacatcggggtgatgctgttcatcttcgttctgcccgtcatgcaggtcatcctgttctgtctggccatcggacgggaccccgtcgggctgagactggcgatagtaaacaacgacgtgaacgtagtggacggctactgtccgtacaacaacacgtgctccatgaagaacctgtcctgccgctacctcgaccacctcaagaaccagtccatcatcaaggagtactacgccgacctcgaaagcgccatcaacgcagtcaaggaggggcaagcgtggggcgccatctacttcaatgagaattatacagactctctggtcgcgagactggctttggctgacactgcggacgacgagaccatcgagtcgtcagaagtgc

SEQ ID NO: 196 - DNA, 494 bp, Plutella xylostella
  misc_feature (1)..(494): Dumpy
gtgtccgggagcgtgcggcaccagcgccgtgtgcgccgtcaacaaccacatcccgtcctgcacgtgtccgcccggcacgtctggcgatccatttaacttctgcgccgaagttgttgtcaaggatatacaattacagacatcggcttgctctccatcaccttgtggtccatacagtgaatgctcagtgagcggtaacggagcggcggcgtgctcgtgccgcgccggccacatcggctccccgcccaactgccgacccgagtgtctggtcagtgccgagtgtaagctgcagcacgcgtgcatagagcgccgctgcagagacccgtgcgagggagcttgcggacgaggcgccaggtgccacgtcatagcgcactcaccgatctgtacctgcaatgacggatacacaggcgatccattcacttactgctacccagctccagctccaccatcacaacctatagacccgtgccaaccgtccccctgtggaccgaactcga

SEQ ID NO: 197 - DNA, 490 bp, Spodoptera frugiperda
  misc_feature (1)..(490): AK (arginine kinase)
atgaattataaactgaaagtcacaattcctgtggtggtttgcggtggtgccgttctcgcgtattacctcatcaggcgaaaagccgcagcaatggtggacgccgcaaccatcgagaagttggaggctggtttcagcaagctccaggcctctgactccaagtcactgctgaagaagtaccttaccaaggaggtattcgacgctcttaagaacaagaagacctccttcggctcaactcttctggattgcatccagtctggtgttgagaacttggactctggtgtcggaatctacgcccccgacgctgaggcgtacacagtgttcgccgacctgttcgaccccatcatcgaggattaccacaatggcttcaagaaaaccgacaagcaccctgccaagaactggggtgatgttgagaccctcggcaacttggaccctgccggcgagttcgttgtctccacccgtgtgcgctgtggtcgctccatggagggctacc

SEQ ID NO: 198 - DNA, 467 bp, Spodoptera frugiperda
  misc_feature (1)..(467): VHDL (very high density lipoprotein)
ggtgagatcttcactctccacattgaccgccagctcaaagaagtagtcaacatgttccacatgctgtactacgctaaggacttcgacaccttcgtcagaaccgcctgctggatgcgcctgtacctcaacgaaggcatgttcgtatacgctctaaccgtggctgtcagacaccgtgaggactgcagaggtatcatcctgcctcctccctatgaaatctacccatactatttcgtacgtggtgatgtcatccagaaagcttacctaatgaaaatgaagagaggacttttggacctgaaactttgcgacttctacggaatcaagaagaccgacaaagacatctacatcatcgatgaaaacgtgtatgacaaacgcgtctacctcaaccatgacgacaaactccgctacttcactgaagatattgacctgaacacttactactactacttccacgtagactatccattctg

SEQ ID NO: 199 - DNA, 451 bp, Plutella xylostella
  misc_feature (1)..(451): AK (arginine kinase)
tacgcagcgggagcgccccgctcgcgcggcacggggcaggtcatcatcttcaacaagcgccccaactccgactggaccaacccctacgccaacatcctgctcaacgtcagcctcatcatcagcggggagcagttcggctctagttttgggtatgagatcgccgctgctgatgttaatggagatgggatacctgacctcctcgttggcgctccattctacttctcccgagacgctggaggagccgtttacttatacatcaacgaagatcaccatctcagccaaacctacagtctgaagctgacgggaaaaccggagtctcagttcggaatctcaatagccaatgctggggacctgaacaaagacggctgtgaagacgttgctattggaagcccatacgaaggcaatggagttgtttacatccatctgggcaacagaaaaactggcttaagtc

SEQ ID NO: 200 - DNA, 441 bp, Plutella xylostella
  misc_feature (1)..(441): VHDL (very high density lipoprotein)
attgagaagaccgatcttgacaagactcgcttcgatgcttaccgctaccttctcatcatcatgaaatccgccattggcctcaacacgatgaagtcagacaagtacttcgtgatgccaacactcctcgacagctaccagaccgctctccgtgaccctgtcttctggcgtcttcaaaagaggatcgtcgacttcttgattctgttcaagaggcgtctgccttactacacaagggaggaactgcaattccaaggagtgaagattgagaaggttgtcgttgacaaacttatcacatacttcgatgactacttcatggacatgactaacgccgttatgctaaccgacgaagagttgaagaaaaccacttccgacatgacattcttggttcgcaagcgccgcctcaatcacgaaccgttcaaagtaactctcgatgtttactcagac

SEQ ID NO: 201 - DNA, 190 bp, Spodoptera frugiperda
  misc_feature (1)..(190): diuretic hormone 31
atggagttgttagtccacctcagtgcagtattcgggaggtttattctaaacttagtgggcatctcgtcgcctccttccggggcctccggcgtagttggctgctgccagtcccatgaggtgcttggcttgaagggcgccagagtatccacggctcaggccaagatcaagggctcgcttctcgctggaattt

SEQ ID NO: 202 - DNA, 440 bp, Plutella xylostella
  misc_feature (1)..(440): diuretic hormone 31
ccgtcggtcaacgcccctgccgccgtgtccaatcacttctccaccatcacgtacgcccgaggcgccgccgtcctccgcatgacgcagcagttactgggagagaacacctacctgaccggtttgaggaactatctgaaggatagagcattcgacgtatcggagccgcgtcacctattctcggccctggacacagtggccgccgctgacagcgccctagcgacgtacgggggagtcaccatcgagtcttacctcaagtcctggtcggagcaggcgggacacccgctgctgactgtcgtggtcaaccacgataccggactgatgcaagttacacaggctcgatgggagcgcaacaccggtgtgtcgggtgtgccgaccctgtaccagatacccatcacgtggacccgcggcggcgcgcccaacttcatcaacctgaaaccctc

SEQ ID NO: 203 - DNA, 480 bp, Spodoptera frugiperda
  misc_feature (1)..(480): pre-mRNA splicing factor
atgttgaatacacggacaggtggagcgtatatacctccagcacgtctcaggatgatgcaggctcagataacagacaaatcatcagtagcatatcaaaggttagcttgggaggctttgaaaaagtcgatacacggccacatcaacaaaatcaacgtcggcaatattggcattatcataaaagagttattgaaagagaacatagttcgtggaagaggtttgttgtgccggtctgtgatacaggcacaggctgcttctcctacattcaccaatgtgtacgctgcactggttgctgccgtcaactctcgcttccctaacatcggagagttgcttctaaagaggttgatgatccaattcaaaagaggtttcaaacgtaatgataaacctatatgtatatcttcagcttcattcatagctcacttggtaaaccagagagtagcacatgagatacttgcattggagttactaactttgttggtagag

SEQ ID NO: 204 - DNA, 480 bp, Spodoptera frugiperda
  misc_feature (1)..(480): PRGP-LE
atggccaatttaattcaaattttcatcgcctgcgcttgcgtgctagctgtttcagcaattccttatggaaaatctcgcaacgcttactcataccccttcaactacgtgtgccgggaatcatggggagctagaccgccaaatggttcgacccctctatctctgccggtcccattcgtggtagtccaccatagctacatcccccctgactgcgacaccgaggacgcttgcaagcataacatgaggctcatgcaagatatgcatcagattcagaatggatggcaggatattggatacaatttcgcagtgggcggcgaaggttcagtttacgaaggtcggggctgggaatccgttggagctcatgctgtgtcttacaatgttaagagcatcggcatttgtatgattggagacttcgttgaaaaacttcccccacaatctcaactggaatcgctacagaaactaattgcgactggagtggagctt

SEQ ID NO: 205 - DNA, 471 bp, Spodoptera frugiperda
  misc_feature (1)..(471): COP I gamma
gattgtttctcgcgaagaacaatatgctgatcaaataaaagtcattcctggcattgaaaaacttggaccaatattcaaaacatgtgagtctattgacttgactgaaccagaaaccgagtaccgcgtccaatgcgtaaaacatattttcgctcgccatttagtcttacaatttgaatgtttgaacacattgagcgatcaacttctggaaaaagttcatatacggttagaagctgcccctggttacaaaatgctaattgaagttccttgcgaacaattgccttatgacaaacaaggcagtgtattctgtgtccttgaatttcctgaaaatccgattgaaactttgggaacctttggcgcaacattggaatttgttgttcgtgattgcgatcctacaactggcttaccagattcaggagaaggatatgccgatacttatccattagaagaaatagaagtgagttgcgctgaaca

SEQ ID NO: 206 - DNA, 480 bp, Spodoptera frugiperda
  misc_feature (1)..(480): COP I zeta
atggttcacacaacaatggagggatctctttttgagccgaccctatacatagtgaaaggcatgtgtatcctggacaacgatggcaacaggatcctcgccaagtattatgataaagacattatgccgacagccaaggagcagaaggcatttgagaagaatttgttcaacaagacacacagagcaaacgccgagattattatgcttgaaggtctaacctgtgtatacaagagcaatgtggatctattcttctatgtgatgggcagctcacacgagaatgagctaatcctccaatcagtattgaacaccctgtacgagtcagtcagtattctactgaggaggaacgtcgagaggagagtgctgctggacaacctggacgctgtgatgctggccttcgatgagatctgtgatggcggagtgattctggacaccgacccaacatcgatagtcggacgcgcagcactacggaccgaagatgtgccg

SEQ ID NO: 207 - DNA, 491 bp, Spodoptera frugiperda
  misc_feature (1)..(491): COP I beta prime
cgcgccgctaagttcgtgcctcgcaagaactgggtgattactggctccgatgacatgcagattcgcgtgttcaactacaacacgctcgagagagtgcacgcctttgaggcgcattctgactacgtcaggtgcatcgcgatacatcccacacagccatacatcctcaccagcagcgatgacctattgatcaagctgtggaactgggaacgcaactgggcatgccagcaagtgttcgagggccacacacattatgtgatgcagatcgtcatcaaccctaaagacaacaacacattcgctagtgctagtctcgacaccaccgtcaaagtatggcagcttggctcttcaatttccaacttcacattagaaggccacgagaaaggcgtaaactgcgtcgactactaccacggcggcgacaagccttacctcataagtggtgccgacgatcgtctcgtcaaaatatgggactaccagaataaaacatgtgtccagac

SEQ ID NO: 208 - DNA, 441 bp, Spodoptera frugiperda
  misc_feature (1)..(441): COP I alpha
tgggaggtggacacgtgccgcggccactacaacaacgtctcctgcgtgctgttccacgccaggcacgagctgatcctctccaacagcgaggacaagttcatcagggtctgggacatgaccaagaggacttgcctacactccttccggagggaacatgagagatactgggtactagctgcccacccgacattgaatttattcgccgcgggccacgatgcgggtatggtgctgttcaagctgcagagagagaggcctgcctacgccgtgcataataacatgcttttctatatcaaggacagacaactgcgcaagttggatatggcgaccaatcgcgacgcgcccgtgatgcagatcaaaggaggcggccgcaaccaaccttacaggtaccttagaaaacaacaatattataaaataaaaataactacggaatgcaaatctcgt

SEQ ID NO: 209 - DNA, 350 bp, Spodoptera frugiperda
  misc_feature (1)..(350): COP I delta
atgctgctcatcacaaccaaagccagtaacatcctcgaggatctggagacattgcgcttgttcagtagagtggtcccggaatactgcactcagctgacagaggccgaggtgttgaaccaggcattcaacctgctgtttgcattcgatgagattgtggctctcggctacagagagagtgtcaacttggcacaggtgcggtcatttgtggagatggactcccatgaggagaagatttaccaagctgtgcgtcaggtgagtaaaacagacatattttcttattttgtaccttgtgagcaaatgaaaatattgttcacaatcgtcatcattgttaaacaatcatatagatattc

SEQ ID NO: 210 - DNA, 439 bp, Spodoptera frugiperda
  misc_feature (1)..(439): COP I epsilon
ggctcgcaagcagctcaagctgctgcaagatattgaagatgacagcaccttgacacaactcgcacaagcatggctgaacttgtcacagggaggaccaggagtgcaggacgcccactatagtataatggagctgtcggagcgactgggcgcgctggggcccgggcctgccgccgtcggagccgccgccgctgcctccagaggtatgtgggaggaagcggagcagatgttgtcggaggcgcaggtccgcgccccgcagcaacccgacctcctgctggggctcgccgtcaccgccgcacatagcgggaaggctcctgaggtattcaaccgctacatcgcccagctcctggacagccacccagaccacccattcactaaagagcaccacgcgaagaccaacgaattcaagcgtctcgccgcccagtaccaaccgtcggtgcca

SEQ ID NO: 211 - DNA, 461 bp, Spodoptera frugiperda
  misc_feature (1)..(461): verm (vermiform)
gcttcctggttgtcatgtagttgactcttgctccaacattcaaaccggagagcaattcgcacgtcttctgcgccacaacttcaaccgccactacagtaccaaccgtgcccctcttggtttccacttccatgcttcatggctgaaatccaaaaaggagtttagagacgagcttattaaattcatcgaagagatgttggagaagaacgatgtctacttcacctctcttattcaagttatccagtggatgcaaaaccctacagaactgacgtcactcagagatttccaagagtggaagcaagacaaatgtgatgtgaaaggtcaacctttctgctccctaccaaatgcatgcccccttacaactcgagagttaccaggggagacactccgtcttttcacttgcatggaatgtcctaacaactacccgtggatcctagatcctacgggagaaggcttcaatgtta

SEQ ID NO: 212 - DNA, 450 bp, Spodoptera frugiperda
  misc_feature (1)..(450): kr-h1 (kruppel homolog 1)
tgtgacagacagttcgctcacagccgctctttctcgatccactaccaacgtgtccacctgggaatcaaactgcaaccctacaagccgcgagacagacgcccccacgtcgactgggtttgtgaaatctgtgggaagacttgtatttccaatgcatcgctggtctgtcaccagcgcatacacacgggagagaagccctaccagtgccgagactgccccaagcggttcagtatattccagagattaaagatccaccaacgcacacacactggtgagaggccgttcaagtgtacggtgtgtcccaaggcgttcaaacataaagctgctttaaacagacatgatcgggtacactccggagctaagccctaccaatgtattcattgtggaaaaactttttctcagtcaaactctagaaaactacatattaggactgtacatctaaagctgcctacc

SEQ ID NO: 213 - DNA, 485 bp, Spodoptera frugiperda
  misc_feature (1)..(485): Calcium-activated potassium channel
atgtttatgacctacgagagagctattaatctccgaactttaaaaggatgtaacgtagtgttggtgttcatcctgagtatagcatcgctcatcatctacttcattgacgcgtccagtgaagaggttgagcgatgtcagaaatggagcgacaatattactcagcaaatcgaccttgcctttaacatattttttatggtctacttttttatacgatttatagcagctagtgacaaactatggttcatgctcgagatgtattcatttgtagattatttcacgatacccccatcctttgtatcaatatacctcgatagaacgtggatagggctgagatttctcagagctctacgcttaatgaccgtgcctgatattttgcaatacctcaatatattaaaaacatcgagctcaattcggttggcgcaattagtttctatatttatatcagtgtggctgaccgctgccggcattattcatttgctggaaaa

SEQ ID NO: 214 - DNA, 486 bp, Spodoptera frugiperda
  misc_feature (1)..(486): InR2 (insulin receptor 2)
ggagaagttggcgagggtcgccagggaggaggccaggccagaacaaacacaagaaactccaccgacgatatatttcccgggctcttgtggcttgcattcatgcggcaaggaagcagcatgcatgccatacaacagtacgtcgcactactgccgctgcacttccaacgggctgcccgtcacccacgacttcaaatgccccagaagcacagttccagtgactctgaagcctatattgaatgtgatccctccgaggacgtcgaatgcctctgacaccagatacctgtcgtcagcgcccaccgcacaaatatccaaatcttcaagcagtggagaaatattcgcggaatctacgactgggaacggctcactaatagatacgggtatgagtgccggcgtgggcactttaatagccgtcacagtttcgggggccgttactttaatactactggtctcaattatcctactgtacctcaaaaagagaatgtgtcg

SEQ ID NO: 215 - DNA, 486 bp, Spodoptera frugiperda
  misc_feature (1)..(486): tubulin 2
gcggcaccggctccggcatgggcacgctgctcatctccaagatcagggaggagtaccccgaccgaatcatgaacacatactccgtggtgccctcgcccaaggtgtccgacacagtggtggagccctacaacgcagtgctctctattcatcagctagtcgaaaacacagatgaaacctactgcatagacaacgaagctctctacgatatttgctatagaaccctcaaagttcctaaccccacgtacggcgacctgaaccacctggtatcgctcaccatgtccggcgtgacgacgtgtctgcggttccctggtcaactgaatgcggatctccgcaagttggcagtcaacatggtgccgttcccccgtcttcacttcttcatgcccggcttcgctcccctgacatcccgcggcagccagcagtaccgcgccctcaccgtgcctgagctcacccaacagatgttcgacgccaagaacatgatggcggcgt

SEQ ID NO: 216 - DNA, 475 bp, Plutella xylostella
  misc_feature (1)..(475): pre-mRNA splicing factor
cgtaccaaagactggcatgggaagccctgaagaagtctatacatggtcatatcaacaaaataaacgtcggcaacataggcattatcataaaagagcttctgagagaaaacatagtccgcggtagaggtttgctgtgtcgatcagttatccaagcgcaggctgcttcacccacattcaccaatgtgtacgcagctctggtggccgccgtcaactctcgcttccccaacattggtgaactgctgctcaaaagacttgtcatacagttcaagagaggcttcaaacgtaatgacaaacccttgtgcatatcttcagcttcattcatagctcatcttgtgaatcagcgggtagctcacgagatcctggctctggagctgctcacgctactagtggagactcccaccgatgattccgttgaagttgccatttcattcctgaaagaatgtggacagaaactgactgaagtgtcattgaaggg

SEQ ID NO: 217 - DNA, 490 bp, Plutella xylostella
  misc_feature (1)..(490): COP I gamma
atgagttcattccggcgagacaagaaggaggaagaggaaggcgggggaaatccattccagaacctggacaagaccacacttctgcaggaagcacggtacttcaacgagacaccagtcaaccacaggaagtgcacgctgattctaaccaaaatcctgtacctgttgaaccacggagatcaggagttgaccacacaagaggctactgagatctttttcgccaccacaaagctatttcaatcgaaggatgtagtcctgcgtcgattggtttatctcttaatcaaagaattgagttcgcaagctcaagatgttatcattgtaacatcttcgcttactaaagatatgactggcaaggaagacttgtaccgtgccgctgctattagagctctttgcagcataacggacagcacaatgctgcaagccattgaaagatacatgaagcaggccattgttgacaagaatccagcggtcagctctgcggctctggtgtctg

SEQ ID NO: 218 - DNA, 400 bp, Plutella xylostella
  misc_feature (1)..(400): COP I zeta
aacacctttgagtctttgctcgaagttatggataatgaaagaatagagaagctccgtgagctatacgagtgtgtggaagacatagacttgctcgccggcatgtgggcggagaacctggtccctgggggcttcgttccgcacacgttctactgcctggtctccgagcatctggtcaggaacgtggtttccgaccgacactggtacgagcgggcggagcgaccactggcctttagcgcacatcagctgcgtgaagtgaggaatgccacgatggcacgtctcctgtgtgacaacggagactccgtcagggccatccaaccgagagcattcgaaaggatagcccctggcaatgacctggtgagctgtgaccagatcccgccggtgaacctcgtggcttggaagg

SEQ ID NO: 219 - DNA, 321 bp, Plutella xylostella
  misc_feature (1)..(321): COP I beta prime
tttgccagatcgtacatgccatcgaaggtggtggaagtggtgaagctgtggcggcaggaggtgaccgccaccaccaacaagaagtcgggccaggcgctcgccgaccccgagagctatgagaacctcttccctgaattcgccgaaagtctagaactagagaagtaccaggcagaattcggctacgagtacagttccaacctcgcaaacattccagacaattacaaactcagcaatattgacagagatttggctttagagaaagccgaagcagagaaactcggcctataccaccccagcgcttcagtccaaagcaccgagccc

SEQ ID NO: 220 - DNA, 280 bp, Plutella xylostella
  misc_feature (1)..(280): COP I alpha
atgcttacaaaattcgagacgaagtccgctcgggttaaaggcatatcatttcacgccaaaagaccgtgggttttagctagtttgcacaatggtgtgattcaactgtgggattatcgtatgtgcacattattagagaagtttgatgaacacgacggcccggtccgtgggatctgcttccacattcaacaaccattattcgtatcgggaggcgatgactacaagatcaaggtatggaactacaagcagaggcggtgtctgttcacactgctcggacacctgg

SEQ ID NO: 221 - DNA, 461 bp, Plutella xylostella
  misc_feature (1)..(461): COP I delta
ggtttgttgactctgcgcatcagcaacgagcagttcggtcgcatccgcgtgcatctcgacaacaaggacaccagagcgctgcagttacagacccacccgaacgtcgacaaagaggcgttccgcgccggcggacttattgccctgaagcagtctcagcggccgttcccgctgcacagcgacgtgggcgtgctcaagtggcggctgcagggcggggacaagacgccactttctataaactgctggccatcggaggcggcgggcggcggctgcgacgtcaacatcgagtttgaactggaacagacgcacctggtcctcactgatgtcgtcctcaacattcctctgccttccggcaacagctcggtagtggtccaccaatgggagggcagctacgcgcagaagggacgggccctagtgtggagcatccctgtcatagacgaggaacacaagaccggcactctgga

SEQ ID NO: 222 - DNA, 480 bp, Plutella xylostella
  misc_feature (1)..(480): COP I epsilon
agcgcgacatcgcccggcaacacctgaagtcaacacttgaaaaaggtcacggaacagttcccagatgatgttgaagcgtggatcgaactcgcgcagatattggagcagaatgacttgcagggctcgctaaacgcgtacacaacagccatgaagatcctcaaagacaaggtgaacacggagatacccgcagagatactgaacaacgtggcggcactgcactaccggctcggcagcctgcaggaggccgctgcgtatctgcaggaggccagggagagagaacgggtggacgcagagacgttggacgcgcaatactacaactctatagcggtgaccaccacctacaacctggccaggctgaatgaggccttgtgcatttacaataaggctgagaagctttacaaggacatcctgaaagagcatcccaactatattgactgttatttgagactaggctgcatggcacgcgacaagggccaaatc

SEQ ID NO: 223 - DNA, 424 bp, Plutella xylostella
  misc_feature (1)..(424): verm (vermiform)
ctcgtctcatcgtcgaacgcttcgccaacatcactgacgcttcgatcattggagtccgtgctccttacttgcgtgttggaggcaacaagcaattcgaaatgatggctgaccagtacttcgtgtacgacgcctccatcaccgctcccctcagccgtgtgccaatctggccctacactctctacttcagaatgccccacaagtgcaacggtaacgcacacaactgcccgtccagaagccaccccgtgtgggagatggtgatgaacgagctcgacaggcgagacgacccgaccttcgacgagtcgctgcccggttgtcacgtggtggactcgtgctcgaacatccagaccggcgagcagttcggacgtctcctgcgtcacaacttcaaccgtcactacaataccaaccgtgccccgctaggtctgca

SEQ ID NO: 224 - DNA, 350 bp, Plutella xylostella
  misc_feature (1)..(350): kr-h1 (kruppel homolog 1)
tgcgggaaggtgttccctcgcagcgccaacctgacgcgccatctgaggacccacacgggcgagcagccgtacaagtgcaagtactgcgagcgctccttctccatctcatccaacctgcagcggcacgtgcggaacatccacaacaaggagcgtcctttcagatgtccgctgtgcgaccgctgcttcggccagcagaccaacctggaccggcacctgaagaagcacgaggcggaggggggcgactcgccgagctccgcggacactgagcgtgaggacacttactttgatgacatccggtcgttcatgggcaaggtgacgtgctccccgggcgcgggccccccccccgccac

SEQ ID NO: 225 - DNA, 466 bp, Plutella xylostella
  misc_feature (1)..(466): Calcium-activated potassium channel
gcattagttggggtgcgcccagcagaactgccggaattctatgaagagacaattttgctgaacccaggcccacgacatatcatgaaaagcagtgacacttgctactacatgagcataactaaagaagagaactcggcgttcgtagttgccgacaagcaaatcgaatcaaaaccgccgatacctaaagatcagactgcatgtagtcttctttctaccgagaggaaaagtgcagatactgaggagtgcaaccagctggctagaactgacggtagtagcgtgcctcaatacgacctcccacaagtgattctgcaagttcccgcgagtaccacaccaaatgcatcgccatcacatatcaatcaagctaatactgtatcatccgctaaatttaccgctactagttcaagatacggagagggcactacatcggactcgtgggctctaaaagaagcagaaggatcgaccgata

SEQ ID NO: 226 - DNA, 490 bp, Plutella xylostella
  misc_feature (1)..(490): InR2 (insulin receptor 2)
accttccgcacttccgatgaagtgaacgcggacgtcgtaaagaacgtgcgagcagaaatcatatcttcaaacaagacgctgccagcggcggaagtcaacgtgacgtgggacccgccagacgaccccaacggctttgtcgtggcttacgacatgcatcataccagggtggaggctaacagtccgacggcagacgtgggcctgcacagctgcatgagtgcagatgactacgagagcaacggcggcggctaccttctacgcaacctggcccccgggaactatagtgtcaaggtcacgcctgtcactataggcgggcccgggaacgtgtcggcggagatctacgtgtttattcctgagcgcgggctgggctcgggctacgagtgggtgtggggcgtggtgggcggctgcgccatcatgctgctcatactgggcggcggagtgtggtacgctcgccgctcattcttaacccccaacgaagcgaacaagctgttcg

SEQ ID NO: 227 - DNA, 361 bp, Plutella xylostella
  misc_feature (1)..(361): tubulin 2
gacgtagtcaggaaggagtgcgagaactgcgactgcctccagggcttccaactcacacactcgctcggaggcggcaccggctccggaatgggaacactactcatctccaaaatcagagaagaatatcccgacagaatcatgaacacatactccgtagtaccctctcccaaagtctctgacacagttgtagaaccttacaatgccgtcctctccattcaccagcttgttgagaacacagacgagacctactgcatagacaacgaagctctctacgacatctgctatagaacccttaaagtccccaatcccacgtacggcgatctcaatcacttggtgtcgctcaccatgtccggagtcacca

SEQ ID NO: 228 - DNA, 376 bp, Plutella xylostella
  misc_feature (1)..(376): PRGP-LE
tgcgatgtactaacgagaagcgaatggggcggggaagacctcccaaggccgatcgacctggtgatcatccagcacaccgccaccgacacctgcaacaccgacgaggaatgccaggaatacgtgcagtggatacaaatttatcatatgcagagtttgaactattgggatataggaccgaatttcctgattggtgggaacggcaaggtgtacgagggccccggctggctccacatgggggctcacactcacggctacaacaggaagtctgtcggcatatccttcattggcaattttaatgatatcatcccaaccaatgcctccttgcttgctgctgaaaaattaattgaatgtggggtgacagaagagcatctatctc

SEQ ID NO: 229 - DNA, 3981 bp, Spodoptera frugiperda
  misc_feature (1)..(3981): Gene targeted: sd; Universal ID: GS921
cgggtgaatgcggggcaaggggagtaacgtccgtgaagttgtgtcagcatatgcgcaaacgaggtgcgcattcgtcgcgtgcgttgtcgggattctttgtgccattcttcgcataccaataagagtatattctttaaatttactcctaaattgacatttaatcaaaattcgtcccttcacttcatcttcggcctccataatagcgagcggcgcgctcgcagccggcaccattgcgtccccctggagcacggcggccggcgcgcccgacaccaatggctcgggcggcgccgacgcaaagcacctggacgtcggcgatgccagcgacgatgagaaggatatgtccgcggctgatgcggagggagtgtggagtccagacattgagcagagcttccaagaggccctggccatctacccgccgtgcggcaggcgcaaaattattctctccgacgagggcaagatgtacggaagaaacgagctgatagcaaggtatataaaattgaggacaggaaaaacgcgcacgagaaaacaagtgtcatcccacatacaggtgctagctaggcggaaacttcgagaaattcaggccaaactcaaagtggatggtggggtgatgaaagaaaaggccatgcagtcaatgagcacactgtctagcgcacagatcgtagcgggtataccgcacccagcgtaccaccatacgcaattttggcagccgggtctacaagccggaccttcacaagacgtaaaaccgttccctggtgctggttacaagggagtcccaggagtaggaggagtgggagtgccgagtgggacagatgtcgcgccgccaccgccatgggagggccgcgccatcgccacgcataaactacgccttgtagagttctccgccttcgttgaacacccacgggatcctgaaacgtacccaagttcggcgccggcgcaacatctattcgtgcatataggtggcaccgttacgtacgcagatcctttattagagtcagtagacgtacaacagattaatgataagttcccagagaagaaaggtggcctcaaagaattatatgagaaaggtccacggaatgcgttcttcctcgtcaaattctgggcagacttgaacacaaataacctggacgatcctggagccttttacggggtcactagtgtgtatgaaagcaacgaaaacatgaccataacgtgtagtacgaaggtgtgttcgttcggcaagcaagttgttgagaaggtggagacggagtatgctcgctttgagggcggtcgcttcgtgtaccgcatacaccggtcccccatgtgcgaatacatggtcaacttcatacacaaactgaagcatctacctgagaagtatatgatgaacagtgttttagaaaacttcactatactgcaggtggtgtcaaaccgagatacacaagagacattattatgtgcagcgtttgtgtttgaagtgtcgaacagtgagcacggcgcgcagcatcacatctacaggctcgtcaaagactgaacgccgcacacccccgcactacccgctcgtcgtacgagacaaccattccttacgcaacccgaatgcagactgcgctgtatcacaatacagtgcccgcaccaccggcgcatgcgcgtacaacacacaattaaccctcaagcatggaattgaaatcacctttccactagagttaaatgcgcatacgccgggtaaacaagtatatatgtacagtaactactaatgtaatagactatgtaaccgcgacagccatcccatggccctccctcgcggccctctacgagtgctgtcctaatttcactctgctcgtactttctctttagattcaaaaataaaaatatttgttattaaaacctataatagcaaaatgtgatctgaaaattacgctacaagtatttttgtaactgagtgtttattatacatagctcaattttaaatattgtctatcgtagtcctgatcccttgaatcggcaactgattgatcggtgtcatcagtacctctatgggctccctgtctatatcacgtaggtctatcctcttgagtttttcataatgctctcgattctaaaatgtgtctataaggttctaagataaagagagtaacaataatattttaaataattcttaaaatacaaaatatcgttcggtatacttcgcgtgtaaaaatatcattatataaaattatatagattgaatacacacagtgcctctataattatgttacattaacataaattacttgagcatatttagtcttttcactgcgttaaaatattgaagaaaaattaaaataagataatgttaaagtgaaaaggttaaagtttagtgtagtataccatggaaataatagatttaataagagtaaatatagaattacgacacctattcttttcagttaagtgctcatggtacaatttaccgttgctatttttagttatctttttaaaccagtccaacttacttctgtcctttagtatagaaaatcttcataaaataatttggcaactattgttttctttcgagtattttattatgctttaattattatttcattttgccttgatacttttaggtctttttgagacatagcattttatttagtttctatgtacgttttgccgatttgacttactattgcagtctttgccacattaaatactaggtacttagggtatggtattgtacctacattgtacatattctattgttatgtacgtaaagttgatagtgtccatgtgttcacacggtctgccagatctaagaatgtgtaaatgtatcatatgtaactaggcctgtacgatcgtgtatctcaatatgtacatatctgacatcaggaacattttctctacaaggacgtcaatcttcgcgcgttccgaggcagctttaccctccagacccttctctgtccagcgttttccatttcaacagtacatccacacatccttctaattttccagaaactaatacaaagcaatatggccgcttttgcttccaatttcaaagtacaaatgagtgtccacagtactcgacatacttgcatgaatatgtaacgtggcaatgatttgatctctcttttagtcaaatatatttagggtcctcccgtgcgtgcaatggtgcgctcatttaattttacacagtgttaagtttatgtgcattaaatagtatttagtttcaagacatgaggtaggaaaatattatcttagataataaaaataagagatttttgtatttatttgatagagttatattagataaattgtaaagtgattagctataaggttcttttttatatggcgatagtcgttcaggaacttatccgtgaagttgtcacatatttagtacttaagagaaacttaatttttgttgcaattgtagattcctctgtccaatactctgtaatgtatgatttgtttggtcgaaattatccttttccacgattgttaaagaaccgtacgacaactttgatgtcttctatttgcaatacgacggcgtgttcaataattagtgaaaaagatctgccctgttgtgattttatatttttaatgttaaatatgtactcaatgaaatgagattaactcaatgttattcgagtccagcgcgatggctccggactggaatatagtttactaaacttaaacatggaattgtttgatgccgatggcaatattcaatataggtatcgttaggtcgtgttgtgtaaataaaataattttagcgcatttctttcagttagtatttgtaagcgttttttgcttctatacaagtctttcatatcgacaatcagccatatcaatatgaaaatataaaaagaattagtcggcgaagttggagacaatcatttgcaatcggacgcgagtaccttcaactttatattgttctaagtttttatgaatatttctttgccgatttattttcattcgaaatggcaaatgattttttacaatactagccgacagtgtacagtattttaaagataa

SEQ ID NO: 230 - DNA, 12334 bp, Spodoptera frugiperda
  misc_feature (1)..(12334): Gene targeted: Rfabg - Retinoid- and fatty acid-binding glycoprotein; Universal ID: GS985
gccgtggccaccgcgcaccacgcacgtcggtgccgcgccaggaactacaaatgagtgctccgcgagaccaaacgcgaaccccgtgcaccacgacacgaccggccagagactgttgactgtgttgcactatagttcacgttaattaatcgcctaggataagagtgtttcgaactgtaccggtttgtggctaatatgttcgagtgttgatgtctgactgagcgactggactggaaagtagcgagttcgaatccttgcagctgacttcacacgaagcgtctgaccgactaaattcagaaactaaacttttggagacatcgctaaactaaggcgcggagatgtcgcgttggcgcggcttcgatggcgcggggtgaacgcgcgtcgcggctaggcgccgatgcgcgcctggctcgtcgtgtgtgcggcgctcgcgctggcgccctgccgagcgaccgctgcgcactcccaccaggaccctgccaggctagagcgcatcaagtcacaaatattagccaagctggggctgtcatcgcgtcccacgccactaggggcgccgcctcgcgacgtggtgcgacaaatcctggcgcgagctgccgaccctcggccgcccccacgacaccacgacccagacaccgaacacgccatgagggaaatcatcgcgatagcacatagaggtatttttatagtgacagactgaaaaagcgtactaaaagacgaaaatgtgacgaagactaaacgcatcgcgctgaccaaaagacctgttctgaataacgacccaggctgcatatgtcatgagagaatcaaatatatatatttagacgaagactgatgacttaaaatgacaaattatgcataagaacataaaaacagagaaaacgtaatgacacaggtttttctttaacattatcaataatactataaactttgcaatcctgcttgtagcaccttattacaacagagtagaatactaaaaacaatttgatactttaattgagaataaaacaacacgtaaaaaagatctcattccattgcgtattccgtacggaaggaccatgttacgccaatacattgaagctcttgtacgcgtaacaattttatagtgccgcagaaataggtcgcaaacatcattggctataacattacgtctagactggaccattcgacagtcaattatgtactttaacataaacgtcgctaagtccatctttgtacgaatttttacacaaaaatgttttcggcgtggatattttttagacagaccttattatatttttttgttcaacccaagagtcgagtttgtgccacacaattaacttaaaattaacacatttttaccgatactccgtaattttacacccaaatctcgctactacaattgtctctactttttatccacgttcggcccactgtgcggtatttacatattcgatttgtgattccgtagttatctggccattgtctgggccgtcaacttgagcactgggcttggcaatcgttgtacatcataaataatcatcgtccatgatagatactacaagactacaacaggacatttctattttattttgtatatttatttattgtttggtccttttgtccttttttttggtccttcggtacaaatcagtcttttctttagattcttgtgtgttctatttgttatgttcgcacaatgccctttgaattattggctgataatttattgggtattgtttttatgtatttctttagttttaaatgactttgacagctgacggacctaagaatttaaagcacttccagtaaaaactatagtaatacgtattcacttataagtatttctattttgtatacaggatattattcgaaatggcccatcaagaaatacactgttttatgtaatcaaattgtcattttctagaaataacatgattgctaaattttttgtgcgagtatgttttcagataacttgaattctacatgatgtgatgtcacaactttgttgaagtttgggacaaggtcctgaaaatatggttctttcaagtacgatgacaagtgcaactgaacaaaaagtctacagacggtggcgttgcaacactttagctgggagtgattctctacgtagttcttgaccatcccacgagatggcacgaccagtctcttctctaaatagataaatgctcgctaggatgcaaaggatccccgaccacccaatctttcttaaacggacataagtacaactatggcgtcgaaggcaccgtgaccgtcttcctgacgggagcatccaaccaggagaccagtgtcaaactcctgggacaggtctccgtctcctctgtaggcaactgcgtgcacgagctggctgtgcagaacttggtcatctctggccctgatggcaagaaacaccaaagcccgcccggcatcgacaagccgatccgcttcaccctgcaggacggccgcaccggtcccgagatctgcgcggaggagggcgacactcgccgctccctcaacatcaagagggccatcatctctctgctgcagacagaacagaagtcatccacccaggtggacatcttcggaacatgccccacggaagtgtcatcatctcaggagggtagcgcagtgctggtccaccgcagccgcgacctgtcccgctgcggacaccgcgagcagggcaagaacgacctcgtcactggagtcttcaaccctagcgccgaaatcaaggacacccaagttctccagtcctcgatgaacgttgagaccaaggtcaacaatggagttcctgagaaggtggccgctactgaggagtacctgtacagacccttctctgtcggagagaacggagccagggctagggtccacaccaagctcaccctgaccggcaaagccagggctgctaacaacccaagccactgcacggaaacccgcaccatcatcttcgagaacccccatggcgtcaccatgaaccagaacaacatgcaatccgccctgaatgccgtcaaggagaccgccaagaccgttgccactgaagctagctccaagtctgctggtagcttcgctcagcttgtcaggatcctccgcacaaccaacaaggatgacctcatgaacgtatacagccatgtcaagggcaacaacgttgagaaacgcgtgttcttggacggtttgatccgtgctggaactggctacagcattgaggcctccatccagctggtgaagagcaaggagctgggccccatcgaacagaaactggtcttcttctcattgagcaacgccagacacgccaacaacgatgccttgaaagctgctgctggtcttttggacttgccgaacctccccagggaagtgtacctcggcgtcggtgccttagctggtgccttctgccgcgagcaccagtgccaccactccaaaaacgacggtatcgtagccttgagcaacaagcttggagctaagctgcagaactgcaggcctaaaaccaaggttgaggaggacaatgtcgtagcagtgctgaagggtatccgcaacatccgtcacctggaggacgctctgattgacaagctggcccactgcgtcagcgacaacaatgtcaaggccagggttaaggctgcagcgctggaagccttccaggctgacccttgtgctggcaagctgaagaaaactgccatcgacaccatgaagaaccgtcagctggactctgagatccgcatcaaggcctacctggctgtgatctcctgcccctgctcccactccgcctcggaaatcaagaacctgctggacactgagcctgttcaccaagtcggcaacttcatctccacctctctccgcaacatccgctcgtcttccaaccctgacaagaagctggctcgccagcactacggcctcatccgcacgcccaacaagttcaataccgatgtcaggaaatactcgttctccgaggaggaatccttcaacatcgatgccctgggtctcggtggaaacatcgagaagaacgtcatctactcccaggactcgttcctacctcgctccgtcaacctgaacctcaccgctgaggtcttcggacacagtttgaatgttcttgaggttggaggtcgtcaaggtaacttggaccgtgtagctgagcatctcttcggacccagaagcttcttgcgcaccgaagagccccaggagttgtatgagaaatacgtccagaagttcaaccagtacaaggataaggttgagggtggcttccacagaggccgtcgctccatcaagagtgaggtcgacagcttcgacaagaacctgaaagccgaagctcagcccttcaacaacgagctggacctagacctgtacgtcaagctgttcggaactgacgccgtcttcctgtcccttggcgacgacaagggcttcgacttcgacaaggtcatcgaccagttcatgcagtacctgaaccagggcatgaaccaagttaagcacttccagcaagaagtccgcgctcacatgctgttcatcgacgccgagctcgcttaccccacctccactggtctgcccctcaagcttgacattattggagccgccactggtcgcctcgaggtcgccacaaacatcgacatccgtcaatgcatcagcagccccaaggacgctaaggtcgacatcaagctggtccccagcactgacatcgagatcactggtgctttattagtcgacgctgatgccatcgctgctggtcttaaagtcatcgtgaacctgcacagttctactggtggtcatgttgtcgctaaagtcctggagaatggccgcggtttcgacctgcaagttggtcttccgatcgacaagcaggagatcgtcactgcctccaacgacctggtttacttctacgctgagaagggacaagctgagaaacacactccggtcaagatggacaatgttgtgaaggagaacgttggttgcttcgaccaagctgccgacttcattggattgactgtctgtggagagatgaccgtgcccttcactgtttctggacctgatgctcaagcttccattgccaagtacttgtcaagctatcctctgactggaaagaccaagttccgtgttatgttggagaaacagaacctcaagggataccacatcaagggtgtagtccgctccgacccaggaagcggcagggaatctttcgaactgctctttgacgctgaaggtgccaagtacggtcgtgctcaacttttgggcgaatacgtctacagcaagaccgagatgggtgcacttctcgcattcaactcacccatgaagaccatctccggccaggccactttcaaccgcaagcccagtgaactgactgttgttgtcaagggcaagtacgatgccaatgaactttacggtaaagttggtttcaacgtgcaaggcggcggcaaccgcaaggtttacaaacccatcgctgagtaccaaatgccaggagaaaaggacaaacataatattcctatttctggacaagtcgttgaagaaatcggtggtggcaagaccaagtactccattgagaacattaagatgaacttaccgagtgtcaaggaacccatctgcattgacggacacttcgctacctctgacaacaaggaagttgaattcgataccaccgtgaaggacctggcttctctcaagggatctgtgaagaagaacgatgtcaacatcgagttccagaacagactgaacccattcatcaacttcaggctgaagggtcactttgaatacgaacctgttatgcgcaatgaaatcgacctgatctatggtggcgatctccgcaaccaacaaaaccgcgtcgtctttggacaaatgctgaaacaccacagggatagcgctgagaactttaacgttattaccaaaaacaaattcgaaatctacgccgttcctctgaagattaaattcgatgctgacattgaccccaagaagattgatgtggatgtcgaaggtcaatatcaagacaagaaggctgacttcgaactcgaagccaggagtcagatcaagaaaccaggagactacagcatcaagatgaaggcggtgtacgacaagaatggagtcgaagtcttcgcgaagagggacatcgtgtccgctgacaaatcgaacctcgaaaactacattgacttcaagaacattggcagatacgaactgtctggagtgctactccacaagtataagcctaatgatatgaacgttggtgctatcggtcacctgaaggctaccgtcggcagcaaaacacaggacatcaagttcgacattggagcaatcgaaaccacaaccttgtattcttctcacgccaaggtctccgacgctcagggagacttcattgacttcctgttgaagaccactcgtggacccaacgccaatggacaactgaagctgatcatcaagaacgctatcgctgccaacggacagttcaagtataccgagggtgatggcaagggcaatggaatgatcattgttgatttcaaacaggctcaacgcaagatcaagggagacttcaagttcatggcgaaggccccagcgtacggcgctgatgtcgatctctacctcaactatgagaagaacaacaatgacaagatccacttcagcaccaacaccaagaggactgacaaaatgctggactccaagaacaagttcgagtactctggccagaagttcgagctgaacgctcgccaggacggagccttcacccctgttggcaagacccacggcatgatcgagatcgtgctgcccactgagaggtgcatcagccttaaggtggaccgtgatgttacccagagcaacgacaaatacagcggacacgctgagatcgtgctgtcagacgccgccaagcgcggaggagcagcttccatcatcagctacaagggcaaggccagcaacaccaacctggagaaggacatcatcaactacgaaggtcaagtggaactgaagctgaaggacggcaagaacctgctgaacaccttcagcctcaagaacaaccctgaaggagacaaattcaagtttgacttcaaatatgacgtgaccggcaacttgctgcccaagcctgtgtccctggtcgccagtggaacttacatggactctttgactgaatctgatgacaagtaccgcatcaagggaagctatggcgatgataccaacttcgagctcgctggtgtcttgcaggctaagcttttggaaggagacaagaagtacttggacgacttcaccgtcaacgtgagactgccattcgagaaggcccatgacatcaggattgtatccactgtcctgtacgtgcaacccgaaaacaaggatgttgttgagttcacaattgtggaatctgtccaagtgaatgctgatgtctacaagatcgatgccaacggtaaggtcagtcctcagactggtctctcgaccctcaagttcctcgtgcctcacgtagaccctgtcgtcctggatgtcaactacaagcttgatcaggatggtgacaagagcgacaaccacgtcgaactcaaggctaagtacggcaagggcaaatctgccgtcatctccatggatgccgaagtcgctcctcgtgacaacaaggtcagcatcaaggctaacgctcctcatgctgaaggtctgaagaaactcgagttctccgtgcactctaagaacccctcgcccgacacctacatctccaacgtagtggtcgacgctgatggccgcgtctacaagtctgactccatcatcgtattctccaaagctcatcctcagatcgatgtcaaatacaccagcccgtccacacctaaacctagcaggttgttcctgaagggaagctcactgagctccacccaaggcaagatcgaggtgaaagtagagaacatccgcgacatcaacttcgacagcgtcgccgaaggtaacgtgcagaaggacaatgtcaacttcaagatgaccgccaactccgagaaacttggcttgaagaactaccaggtggagatcgccagcaaggacgctggtaacggcaagcgcttggagttccacgctaccaacgacaacaagaacgttcttagtggaagcacctcttacatcagcaagcaggaaggtcctaagatgatcatcgagggctctggagccgtcaaggtcaaggaggatcagaaatccgccaacttcaagtacatccgcaccatccttggtgaaggcaacgagaagggtgttgagaccttcttcaacatggctatcggagaacgcagctatgtcgctgagtctcgcgtcaccaacttggagtacaagaactcatacgtctactgcgaggagaagaaacagtgcgctcatgctgaaatcaactctaagatcgatatgtccaaacctggtgtcatcaccaacgttgtcagcgctggtttcgacttgcgtaagttgggtattgctcccgaattcggcctgatgatcaaggacgaggtctcagaccagaggctgccgcaatacaccctggacctgcacatcaacaaggaagacaagaaataccacatgcacgtgtacaacactcctgaattcggaaatgccaagtctggaattaccatccagctgcctcaacgcgtcatggctttggaatccgtggtcagctacccaaccaacaagggtctgccattcccagtgcgtggtgaggtctgcctggacctggacaagaacaagcagggtcacaggactagcgccagattcctggtcgatatggatgtcactaacgagaagaaacagactgctgttgccgagttcggattcaaccatcctaaactgaagaaggaagcggtagtgaaggtccatggatcagtgctccaccctcaacagaacgccatcaagattgagacctctgcctccatctcgcacccaattcttggcggcgaccgtgaatccaaactgctgttggaaggatcaccaactcacctcaaattcttggtgaacactcctctcgttaaagtagtagacttggaaggaacagccacagtgaacgagaacttgcagaagggagagatgaaggtctgcctgctggaaggcaagccagtccgcgtgatggccatggccaaagactaccagtacttcgagttcaccacagatgagggtgaccgcaaactgtccatcgttggtcacgtccaacctgagaagcgtgtggatgtcagcgctgacctgatcctcggaggagaaaagaagaacatggtccacggagctctgttcctggacgacagcctcaacctgaagaccgactacggcatgtccaaggacaacttcaactacttctactctgccctccgtaaggatctggacaacttggaagctcgcatcaagcagttgggagacaaggccagtgatgacttcaaggccatcctccagcgcgccgagcccaccttcaagcagatcgagaagtcttacaatgatgacctggccaagttctacaaggagatcgctgatgacaaggtgctgaaggagctctctgaggcattcgacgtgatcgtgcagtacttcgccaagatgttggaggaggtgctgaacagcaccaaacccttggttgacaacatcctcaagacctacactgaggccgccaagcagattaaggagatgtacgagaagaagttcgaaccagccctgaagcagttctacgctactttggctaagtacttcaaggaatacctggactctctgatcgaggtggtggctcgctactccgcgcttaccgccgacttctacgagaagcacaagccagagcttgaggaactcaccaacgccctcaccgctatcttcaaggacttgactcgtctgctggtcgctcagatcaaggagttccgcgctcgtgtcgctgccctcaccagcgaactgggacagtccatcaaagagatgcccatcttcgcccttctcaaggagaaataccaagagctggccatcccagaacaggctttggctcttctcggagacgcctacaacaccatccgcgccctgatccccactcctgagatcaaggacttcactgacgccctccattcttacgtcaccaagaaactgaaacaagaaaaggtggatgaccagaaggagctccgcatcatctaccagaagctgtccactgccatcacctccctgatccagttcatccgcgctcagctcggacagttcggcgtaccttctggacctcttagcatgaacccgttctccttcgcccctggctccgtgcagtcagccccagccctcggcagcccaccatccgccagcctgctcagcaagctgctgacaggagacgcacctgatgtcctcgctttgatcaagtcctacaggcctaagagcttcaaccctctggatgaggtgcctgccaaactccgcgctgtcgtcgtcaacggccaacacttcttcacattcgacggccgccacatgaccttccctggcaactgccgctacgtgctggctcacgaccacgtcgacaggaacttcacgctcatgctgcagctcgccaacggacagcccaaggctctggtcttggaagacaagagcggcaccgttgtggagcttaaggacaatggacaggttaccctgaacggtgccaaccacggtttcccagttatcgagaaggattcgttcgctttccgccaggctaatggccgtatcggtctcggaacattgtacggcttgatggctttctgtaccgccaaacttgaggtttgttacatcgaagtgaacggcttctaccttggcaaactgcgcggtcttctcggagacggcaacaacgaaccctacgatgacttccgtctacccaacggcaagatctccacatcagaaagcgaattcggcaacgcctaccgtctggcccgcagctgcccacaagtgcagactcctgaacacaaccaccaccagctccaccacatggccatgccaccagcatgcgaacaggtcttcggaggatcctcaccactcaggcctcttagcctgttccttgacatttcaccgttcagacaagcttgcatccacgcctgctccggcgattccaaggaggctgtccaccaggcctgtgacctggctcgcggttacgtcgccctggccctcagcagcatgctgcctgccttcctgcccgacgtgtgcgttcagtgcagagatgctgacaaacccaggaacgttggagaaagctacgaactcaaggtccccaacaagcaagctgacattgttgttgcattcgaaactacaaaggacaacgagaagaacttcaaggacatcgtagttcctctggtaggccaagtgctggacggtctcaaggccaagcgcatcaccgatgtgaaagtctacctcgtcggcatcacccccaagttcccctaccccatcatctacgacactgaccagagactgaagaacgccaaggttcagtttgacgacgagagccgctaccagaggctggctaacaagttcaagaccaaggatggccagtactacaaccgctatctttacgaggtcgcctccatcgtcgatgctctcaggattgagttcggactaaccaacatcgttgctggataccaatctatcttcgaccttccgttccgtgccggagccgtcaaacacaccatcagcgttgttggagaggaatgcatcagccagttcttcttggtggaagtagcccgctccatcgcctacagcgtcgccttcgagaacatggcttactcccactccatcgtcaccgtcactccctccggatccctcaaggtcaacggcaagaaccccgcacagattgttggttacactgaacgcgctgtgatcatgctgggagacaagaaggtcggcaaggatgctgagaacttgaggagcacactcacaaagacacctgacgcttgcagggacttcgttgagtcgtctgacggcatcgtgttctccgccacgaacttccacggcatgaaccctggccagcagaagcagttcctctcgactgctgctgcagccatcaaccagcggctgctgcacgagactgtcgtgcaggactgcacctgtgtgtacgctgaccccttcagggtgcactccgtgtgtgtcaccaaggacaggaaagaagtggctcgcagacggaagtaatctgcgcccgaaactgtgatccaatcgtgccaaataccaaatactctagcgttaaagtagcctagtgagagcgagacgcacatatagcaatatatatgcgtctcactcgcacaccctcatcaaaaaatcttttacagaaatatgaagcaatatagttccatacaatatttaactttattattagttatagaaagaagaaaatggattgacaatagtttttaattgttctatgtttctgtaaaaggtgattatcattgaaattgtttaaaaaaatcagttttgtatttatgtatgccgcggaacatcttgaggtattaattgatcatgatcgact

SEQ ID NO: 231 - DNA, 756 bp, Spodoptera frugiperda
  misc_feature (1)..(756): Gene targeted: Rpb7; Universal ID: GS922
agtaatcactagtgctgtcacaaaacaatgttacaatattcggttcgacgaacaactcgccgcagcgtacaacatttagtttagcgaaatctctttaatttattattgttattgttgtatgtaatatgaatagaaagtatttataagtgtacacaattaatttccacaatgttttatcacatatcattagaacacgaaattcttctgcaccctcggtattttgggccgcagttgcttgatatagttaagcagaagttgtatactgaagtggagggcacatgtacaggaaagtatggtttcgtgatagcagtgacagcaatagacagtataggagctggtctgatccagccagggcagggctttgtggtgtaccctgttaaatacaaggctatagtcttccggccattcaagggagaggtccttgatgctattgtcactcaagttaataaggttggaatgtttgcacaaattggcccattgagttgtttcatttcacatcattccatcccagctgatatggagttctgcccgaatgtgaatcccccatgttacaaaagtaaacaggaagataacgtcatacaggaagaggatgtcatccggcttaagatcgtcggtaccagagtagatgctacaggcattttcgccattggaacattgatggacgattacctaggattagtaacacagtaacatttatgaataaaataaataataagtgtacaaatacaaaatattgtttttaataaagaaacgaac

SEQ ID NO: 232 - DNA, 1525 bp, Spodoptera frugiperda
  misc_feature (1)..(1525): Gene targeted: calypso; Universal ID: GS924
tatcctaatctccacttaggagaaacattgagcaggttaaagcaccataccctgggaatgaatcctgagaacaaaggctgggctataggaaacacaccagagctggcttgtgctcacaactctcatgccatcccacaagctaggaagaaagctgataagaatgctggtgtctcaaccggacgctttacaggtgaagcataccattttgtgtgttttgttcccataaatggacatttgtttgaactggatggcctgaagccatatcccaccgaccatggcccttgggcgactgatgaagactggactgataaattcaggagagtgatggctgagagactcggtagagatgctggagaacaagttcatgacataagatttaatttaatggcagtagtacctgaccgacggatagcattgacacagaaactgaatgcactagaaatgaatcagaaaagagttaaagaagcaatatcaaagattgggaaacatttgcgacatttgttatcaaagcgcagagaggttactgaggaaggagaatcactctcagaagaaagcaacgagaattccctaaatgagaatatagtgcagatcagtgaggaaacaatactgactgctttagaatcatctcagttgcagttgtacgatgtagactacactcgtcccatcaccattgagatcggggccaatgatcggccacagcaagacagcagcattattctagttgatccagttgagcagggtgctgttgttaagtttatctcaatcaacagggacaatcaaatagtgggagatctataccccacatctataaccgcgttagtaaagagcaatgatgcaccagtgctggtctgttgtgagacggagcctgatcaaccaatcaaattgaggaagctgttactgactcattcagagctgaacgctttgatgagcagcatcgtcaatgaagtacagcagtgccagcaggcactcaatgatgagaatgataagagagacatgtataaggtggacgactgtcgtcgcacgcacaattacgacgagtttatctgcacattcctatccatgttggcggagcgcggcgcgcttggcgagctagtagcggcgcagttggagcggggacggtcctcgcgagctcgccgccggcgtcctaggccgaggccccgagctaggccgagacctaggccacgagccaggaaataacaacaaaactcgtataacaaacctgttctattgcagctgttagcattaactatctacataaaggtcctgctttactagatattgttgtttcaaaggtatcagattctcatacagactctgttgccttgtggagagcagtgcattgcgttattcgctttggctattggctaactatactcctttgtgaagttaacagtagatctagagattgtattcccagaaaaaaatataaaatagcgtcgtattatgtaaccttcaagagattccaagtattatgagtatataaaactactctataaaagtataggactgcctataacaagcagcg

SEQ ID NO: 233 - DNA, 1710 bp, Spodoptera frugiperda
  misc_feature (1)..(1710): Gene targeted: Rbm24; Universal ID: GS917
cgcgcaaccaccacgacgaccggtcgctcccgcacgcacgccagtgtttacaactgtaacttaagctacacccgcgcgaaccgtagcctgacagaccgcgacagcggccgcagtgacagtgttagcagagtgcaacggtggccggcgcgacggaggctgtgcaaggcatgttgatggcgggcgctctgccggccgagcccgaggggctgctggcactgggcgcgctgccaggccagaaagacaccacctggaccaagctgttcgtcggcggacttccgtaccacacgactgacaagagtctcagggaacacttcgcagtctacggcgacatcgaggaagcagtggtcatcacagacagacagaccagcaaaagcagaggatatggcttcgtgataatgggagaccgagcggcggccgagagggcgtgcaaggatcctaaccctatcatcgatgggaggaaagcaaacgtgaacctcgccattctaggagccaaacccagagggaacctggcgccaggtttcggcttggctgctgcagctgcagcgggagtacgcgccgggtaccaaacagtgctgccttcgccatatgggttgtcaccgggatacatgtacagcacgccgcagtacatgaatgcgatgagcggggtgggagctagcgtgggcacgggcgcgggcgggctggtgcagctgccgcagctgcagcacgcggctgcagtggctgccgccaaccacctgtacgagtaccaggctgccgcggcgcagggcgcggccgcataccagcaacagtacgctgcggccggattcgacccctacgctacagccgctgcagcagcggcagcggctagcggcgctggctacgtgtccccctactacacgctgccaggaggcggcatgcaggcccccctcctgccgccactgccataccccccgcagctacaagaagccaggatgcagtaggagcgctcatacagctcgggtacattactgatgacacgccaaatcaataaaagtatgtggaagggaatgaaattgaagtaaagtgaaggcgaggacatggacggcgacatagtacaagttaggggcgatagctcgtgtaggtaggtatcaagtatcgttgatacgtagcgtgtaagcttaatggtaattgtaatattctgttattcgtaatttattttgttgatatttgtaaatctacatgttgataactatttattatgtggaagattaataaaaattgttgaatatttaacgaccgaatcgaatctcttacctcccggagctttcacagttgaaaacataagattcggtccaatatatagaattatatacattcattatacttttaaatgtaagtagaataatattttaagtagatgcgtactaaaggaacagttagccatagacgtggccatcttgccttatatagatgaaatattgtacttagttatatattacactaaatatatacacatatcatcaaatgtataaattaaatatcagagcggcatctcgcactgaattgtccataatagtgcatttcattcacagtaattttaagcacaataactattatattttatgtattgcataactataaaatgaacgtgaattcataataaatacttaataactgttataattactttaaattataatatcgtacttaatttaggttaatataaataaaatggaaaataaatttttaaggtac

SEQ ID NO: 234 - DNA, 803 bp, Spodoptera frugiperda
  misc_feature (1)..(803): Gene targeted: twisted bristles roughened eye; Universal ID: GS919
gtggtgctgtcgacaagacgacaacagggaaaggcgataaccaaaaaaataaaatacgttttctgtagttgttagaaatatttacagaaatcaaaatgttggacagcatatttgatgatgtgaagcgcatgaacaaacggcagtttatctaccaagttttaagttttggtatgatagtgtcttcggctctcatgatatggaagggccttatggtggtcaccggtagcgaaagcccaatagttgtcgtgttgtcaggcagtatggaacctgccttccacagaggggatttattgtttttgacaaattaccccgaggagccagtacgtgttggagagattgtagtattcaaggtggagggacgcgacattccaatcgttcacagagttctaaagcttcatgaaaagaacaatggtacagtgaagttcctaactaaaggagacaacaacagtgtggatgatcgaggcttgtatgctcaaggacagctgtggctcactaaaaaggatgtagtcggtcgtgccagaggtttcttgccttatgtcggaatggtcacaatttatatgaatgaatatccaaagtttaagtttgcggtactggcgtgcttagcaatgtacgtgttagtgcacagggagtgacagcattaatttgatctgaagtgttgttaagatggccgtctaaagagatacaaatggctctgtggatgtatttaattttatgattaaatgaaagttctctctagtgttacttaatgtaattgttttacttaaatatatggtttttattacattatttattgcaaaaaaaaa

SEQ ID NO: 235 - DNA, 2568 bp, Spodoptera frugiperda
  misc_feature (1)..(2568): Gene targeted: surfeit 4; Universal ID: GS923
gctacggtctgacgtgacggttccaaccaaaggcagtgaaatttcattttttagtgaatgtgcttgtgatacggtttgtaaaatgcaaattccaagggaatatgtgtctactgctgaggatattgcagatcaggtggtccgtaaaggcaagaatgtgttgcccacggtagcccgcttgtgcctcatctccacattcctcgaggatggtctccgcatgtggttccagtggtcagaacagcgtgactatatggacatgtcatggggctgcggcaaggtcctagccacaatgtttgttatagtaaacttagtgggacagctgggcggctgtgtgatggtgctgggcaggctcaaggtggacatcgcgtgtggagtactattcttcatcgttgtactacagacattcgcctacagtatattatgggacatgcaattcttgctccgtaacttggccctcatcggagccctactgctggtggtagcggaggcccgcgctgaaggccgcagcctcttcgccggcgtgccgtcactcggagagaacaagcccaagacctacttgcagcttgctggcagaatactcttggcattcatgttcatcacactgttgagattcgagatttcattcttacagatcgtgcaagacctgctgggcagtatcctgatgatcttggtgacagtgggctaccgtaccaagctgtctgctctgatgctggtggtggtgctctccctgctcaacctgtaccacaacgcgtggtggacagtaccctcgtacaagcctcttagggacttcctcaaatatgacttcttccagactttatctgtgatcggcggtcttctaatgatcgtttacttgggcccgggcggtgtcagtatggacgaacacaagaagaagtggtagaaacgcgaccggtgtgtacaatgtatgcacatgttaaagactattgatattttaatcataagatgttatggtgcaagaggaaagaaaaaatttcatataatttggtgtttttatgtgacaatctgactagtcggcgatattgtgaacattgagcttacttccatatcctgttctgttgtgctatgggtagtttgctcttatctagttttatatacatggtgctccatcaaggtgtctcagtgaggaataatctaactcattaagaagttgtgcagtttatttattttatttagtacaaacttcccttcttctaaatgtgttggattattttttactgatctacttcagtggagcactctgtatagtaaattttgtgggacgaagtcttgtgcaaatagtttgtgttaacccaagttggtactaggtcggcttatagaacaacacagcttacagtgcgaaaggtatttaatcctaataccagagtaagtgaaaaaatgtaatacatttaaaaacatgttgcaaaattacataaggattctagtcctacaaaataatgttgtatatatttgaactttgttatcatgtattttataattataatgcatggcaaactgcccatagcaaaacaacagttggtgtcataacacaaaattttatataaatgtgcacgtatttggtcgatcaatataaagtacggtaagcaaataggtaacgacccggtcaatgacctacgttttgataataaacttatataaacacattcataatttctatattgtcaattttttatattagtaatttagtactagcactgtttaacagatagtgttgtgaaccccaagatgcagtaagcatggttgcagcattgtatggtcatgctactgcaacaatgtgctcgaaatcgaaactctattcattgtaaaacttttgtgcaataactttaggttacatcacgccaagtacaacgctacgttatttgtaaaattacaaaagcatgtacttgacgtgacgcgagctagctatgttgacgagttgtatgaacacaagtagaaatatttacaagttgcaagacgaggcatcacaatgcgtcacttgtgtcggtactgcgaggctacagctcgggctggcgacacaaacactcagtttacgatgcgtgtcgggcgcatgttgtagcactccaatcaatgctgcgctcaagcgtgccaaaccataaactcccttccttcccgcgtagacgtgatgtttccttagcggtcctctcctctgcctttaagtgtatctactcagactgaaccaactcctgctttcattctcttcgcgttacatttttcattccattatgtttcttgttgttgtgattcaatgtaaatatttatatgaaattatatctattttgtacttactgactgaataaccgactacggatctttgattgtaaacgcaaatgctctttttatgaatttgaatattccagtagccataagtgaaactttggtatcacaattcgaagatttgtgtttcatctacctaacgaaataataaaatgtagtcatatacaaaataattatttgatttatcaaaagtatttaaaagacacatatttttgtattattttttatttattttcttaagtttcagtttggccatagttataaagattcctgaaaagattc

SEQ ID NO: 236 - DNA, 1431 bp, Spodoptera frugiperda
  misc_feature (1)..(1431): Gene targeted: Rpn7 regulatory particle non-ATPase 7; Universal ID: GS925
agtgacttttgtttttgcaagttgtagaagttgaatgagacgagaaatttattgtgattcgagttgtgttgattatatttcgtctttattacgatagtattactaattactacaagtcataatcaaagatggagctctcagctgaaggtaaaacccctgaatacatggcattggccggaatcaagttcaagcttagtttgcctcacttgaaagatgatcagcagctgaaagagcagctcttccaaggaatcaagagtggacatatggctccttactataaagaggtctgtactgaccttggatggaagttcgaccagaagttgtatgatgagatggcaaaagagaaccaggacaggttagccaagtttcaagaggatgattcagagactccagtgtggcaggacaggttggactacctctgttcaataggtgacaaagaaggtgcaactgccctggctgtctccaaatatgaagattccacactaaccacaaacagacgcctggatgcagtctttgctttgttcagaattgcctatttccatggttgtaacgttaaagaaatgggcaaaaacataaataaggcacatgagctggtagataaaggtggagactggcgttccaggaataagctgaaggcatacgaagcaatctattgcctcgcagtcagagactacagcaaggctgcagatttgttcattgattgcgtatcaacatttgaatcttatgagcttgttgattttggtacgattatccaatattgcgtgttggcttgtgcactggcgctggaacgtcatgctcttcagtctgctctgaggcgccagggtgctgctgtacaggccctgcgctcgcggttcccagagctgagggaactggttgaatcactccatgaatgtcgttatgctgatttcttgaagagtcttgcctgggtggagacccaaatctgtgtagacccagtatttaggccccactaccagcactacgtgcgcgaggctcgcatcaaggcgtacgtccaactgctgcgcgcctaccgctcgctcagtctggacaacattgctgatacattcggcgtctcccgtgagttcgtcgaggaagagatctcgaacttcacagcagcgggtcgcttgcaatgtcgcattgatgcggtcgcgggttgcgtggtaacgggcgcgggtcgcggcgccgacgccgaccgctcgcagctgtaccaggcgaccatacgcgagggggatctactcctcaatcgcgtcaagaaactagccagtgtcatcaacttctagtgttcatgtgtgcttggtaacattattatattaattataacattttaagtaattaaaaaaaaaaaaaaactggtttttatttaaattgttttagttttcatcagttgcaatagtacaatagtagcagacatataatttgctttaaaataccaag

SEQ ID NO: 237 - DNA, 6237 bp, Spodoptera frugiperda
  misc_feature (1)..(6237): Gene targeted: how - held out wings; Universal ID: GS986
agcgcaggcgcagcgctatattcacccacaacttcacttcggtcaacttcgactagtggtgatcgaaacttcgatgtgtgtggaagtgaatttaacttttctaacataatctcacaaaaataacaataatcagtaactaaagtacaattatcttatttgatcgtgtcggaataaacatttaacgtgtcgttagttatataaatagtattcatgatgtgtgataataacagtccttcgacgcaaagtatagcggactacttagctcagttgctcaaagacaggaagcaactggctgcgttcccgaatgttttcatgcacatggagcgacttctggatgaagaaatagcaaaagttcgagcaagtttattccaaataaatggagttaagaaagaaccactcgttctaccagagcccgaaggcgtggtcaccacactcacagaaaaagtttacgtgcctgtaaaagaacatccagatttcaacttcgttggaaggattctagggcccaggggtatgacagctaagcagctagaacaagagacgggatgcaaaataatggtcagaggaaagggttcaatgagggataagaaaaaggaggatgcaaacagaggaaaacccaattgggagcatttggctgacgacctccacgtcttactcacagttgaggacactgagaacagggcgaagataaagttggccagagctgtcgatgaagtcaaacgcctgcttgtacctcaagctgatggcgaagatgagctcaagaagcgtcagttgatggagttggcgatcataaacggcacataccgcgactccagcaccaaggcggtggtacccgtcaacgcggacgaggagtggcggcgtgtggcagcggccgcagcggagacccagcgtctgctggcaccgggcggcgccgtgggaggcgtgggaggcgtagcgctcaggacacaggccccgctgggcgcgccactcatcctgtcgccgcgcatgtcgcaaggcgcgcaggccggcctgctcaacggttcaggcgcacaggccgccgctggcttgctgtcgcccggagagcccgcgcaccagctcatctacgcctctccttacgactacgccaactacgccgcgctgaccgctgccgccgccaacccgctgctcaccaccgagtacgctgccgccgaccatacgggtgggttgttcgcccgttgatctttacgaacgatgtttgataaccacgggttacgcgtcatagggcagttagaatattttgaggacggttgttacactagaaataattttaaagtctgatgcagctaaaaggaaatgcaccacgtcgactgagactacgtaattaaaaaacttactaaataaaagataaccctttattatgcctgttgctggacataggtttgatctcaatctaaaaaattcgaaagctggacttaaaattaaaataattttagttatcaaacatcgtttattacatactaacgctacatacacacggtaccgggttttaaatcgtcaaatagtatctacacgtagtcaacggaaaataaacgttagataaaattcgtattctacaccaataaatatacagttcaattactgatcatgtaaatatcgaacaaaataactgcatgttaatacgtggtcggtgggaaaaatgggtgtacaagataacttagtaagtctaaatagatattagaaagtgtagggtcagtttgagccaaatacggtctttgccggtaagaaaacttcttaagtcccaatgtcccaaatatctttgagcattttaatgctctatccgatgtcgcataccgttttgtcttttgagcttccgtacaagcttgttcccagcgacttggttatacgtatagaagcggataatctccatgtattgctttctagttggtcaattcatgtgttagtagcgacatcattaaatacacgagggacttttgaattaggagtatatacggcaataataccgtcatacgttaacgagcagccttgcagtactaatagtaacaaccaaagagctcgaccagaattttaactccattgtttcttgtccatagcacgtgatttgaccgattgcatctggagcgttatatggagggattatcctgctgcgcgatattagactttatagccccgaaacaaagttaattatacacaaaaatcggttaacggttacagacgctgctagatcactaaaacagctatttatttaaattaatttaacaaaaaaccaatcaggctcgtgattacacagcactaacaaactaatgtacactattctaacgtatggtgtcgagcttttgttgaactgtgtgtgatataaatattttaatggggtttgcagcgtcgagatatctgctagctggcttttgacattggccgcaacagcccacaataagatatggcagactgcaagcgccgtatcgcactacgcatcattattgccgtccttgatatcataatcctccttctaaacgcctcacaggacgtcctctttacagtcataataaaacgccatgatcaatttatagtttaagaattattgttttaagtacgtttagcttaacgactcattattttgtacctacgatgttatcgtctttaatatttacgaacattgttttttcttctacagctgttttgtacagtttcatacaaattataacttttgtttttacttgacagtcaaagatatattatttattatataacagatataattttactatttattcaaattaatataatgacgattattatcaaaatatttattgagaatatattttcttttatagcagttgtttcgtgttagggttgatggcagttaattattgtttttttttaaattagatattattttagttgaatataaactgccaatagaactctatataagttaccgatgttttatgcaaagacgtagagtttttatatatttatttacttgtctcgttacacttcactcgaatgatgatagatacgaatagatcccatcatttagttcttgtgataacccttgcttgtaacacaactaatttattaacattatgttaatgtagaatcaaactccattgaattttggactaagttatatcttacttaaaagtattatcatatatttaaaaattccaccatatatgcatgtggtttgtttccatcctttgtctatatttccagttaaatacttgtgaataacaaattgaaattttcgtattaacaatagtatatctgaatgacgcaatgagttgaatagttaattcagcgattacaagcaaaagggaccaaatacaaattgatttacgaaaggaacacattattacatatttaactatattttaacaaaactgacaaaattaataacgcgatacacactcacatacgaacaaaacgtggaacattctaggcggttttaaatgtttatatacgtttaacgcgtaagaataactttggcaccagtatcgtgcacactgttatttttacaaatattatatcgtaacttattaatttattagccatattattatatttataaacataccataggctaagtattattattatctttaaaagatttctagttaggttagaaaagagtgagctttatgaaaatattatacacccgtatattattgtttaggtttattatatcgcagttaacactgtagtcaattttaattaaaacatgaaattatcgatgccagccattacctgtaccttgatcgggcgttcgtagacccgttcgtttaaatattttattttgttatattttccaaagcaataaaatagataatagagtataggcctaagcataataatagactttagtgttactgccaaatgaagatttaataataaaattatatcttagtattaccgaacgacaatgacgagtatttggcagtgatatctaggtacttgcgatcgttaagtgtagaaaacgaaatcattgttttttctatttctattttatcgatgagattaaattctttgcagcatttagatgtaaaaccacacccagttctatatagtctatcagctttaaatgtatttgtattccaaattggttttccagtgaatttctataatctttaatagcaaaggtctgggttcaccgactcggtgttggaagcttttaatgttgagccaagacgcagatgttaaatgtgtatatgccgctaggtgtggtgaggagggcgcaacggctcgcgcaggtcagggagcacccttaccagcgcactgccttaccggcgccttaattcccgccaaaacgctctcacgccgccattttgttcacaaggtgagaagcgcgtgcgcgcgcatgcagctagatgaatacgtttgcttgtctttttttaatgtaatattgatgagaacttgcgttttttgtcgaatctcactttaagttatctcagtatacataattgcaagttccgattttcttattgattaatttaaatttattgattttattctttcgagcaaccttattcgtctcgagtatgcgtgggtacctttgctttactgtctctctgtgtcactatttatatttattatattgtgtacttattagttacgttcttgaatagtttgtatgaggataagttttatcgctcatcaaaccggatctgaggtgacactgcataatttgaaaactgtgatttttatatttcttttttatagatatttagatctgttacatgttgtgatgcgaggcattattagagatctatctgaattcaaagttgaacatcagcgttaccaaattatttgtctgtagttgttttcaatgctgttgttgcaacaattgaaatcacaacatgtctacggacagtcgtaatattttcaggtataaattatatattgagggaagaaggattgatgttacattattcttttattgcaaaatttgacatttaagtagttcgcttagacattagtgttcaatattgccaaatgaatccacggaggtgctacaagccggttgtgaggtccttctttcctgagtctcgcccagtattagtcaaaggaaagagcattctcagaatttgtgccatcaatccagtattaaacgtaatgcccctcctttgacttgatatgtttttcataatcatcacaactttctattagtcaatataagatttttatatgaaattttttaagctagttgtttttatttttgccttaggtattattatatttactttcttatttgaaagtggtttattattaagataatttgcacttgtgtccttgtggatttaaagccggcatccataatgccggttacgtattttcacgcttctttatatgaaatgatttaagtcgaaatgctattcgtaattttataaaatgaatgataatatgcgataatgttttgtaaagtattgtttccgttgttgattgtaaataaatgcattttctgagaatatacacgcaataaattgtctgaaatttaaattaagcgttttctttctttagtctcgttaggtccgcggtactaaagttaatgttctattgtgttacaagagtatatatgtcgataaagttgatgacgtgcagtcatttggtcaattgtagcctcacacaactaacatgcaactccacaaggccaagttcccgtttgtttacataataataattattaagtgcactatcataactgctattgtcacaacttgcagattatctgtaactatgtatttatattatatgagtcactaacatgcaaatatgtaatgacattgattcgttatcacaaactaattaacaacttttatgagaatgccgccatatacagtattgagatgttgcagcaatgtgttgaataacttacatacttgcatctgggtgctatggttatacataagtgataaatttattatgcttgtttgtctgagcaatgttcgtcacacgcttccgttgtgtctcaagcattgctcttttgggaactattgggcatttaatcctatatttgtagatttatcatttacatactaaattgacttaacatttttcaaccattaactgcgtaaactaattaagtacccgtatagtattaactgggccacaaacagaacaagtgtcgcggcgcgaatgcctgatagcctccccctcatttttattcaatttctatttttatgagaaattccgtacactagtcatgtcaatccgagaccacgatttatcgcttttgttgaatagctgcatgttgccggtcccgactgtcgt

SEQ ID NO: 238 - DNA, 2019 bp, Spodoptera frugiperda
  misc_feature (1)..(2019): Gene targeted: Phenylalanyl-tRNA synthetase beta subunit; Universal ID: GS926
caacaaaatactgttggttttttagcatacaaaaataaaacatgcgtacctagacagtgagatagaaaagaacaaaaacatttagcatgcaatatatttttaatttcttattagactgacgttggcattatatctagacgtgccagctgatgagaaatatcaaagttgtacgatacttgtacttttgttactaattaaatatatttgtcgcacatactataatttacaatgccgactatatcagtgaaacgtgactctctatttgccgcacttggaaaaacttacactgacgatgaattccaggaactttgtttcgaatttggcttggaactggatgaagttacaacagagaaacagatgttaatgaaagagcaaggtgagcatgttggagcgggagtatcagaagagatcctctaccggatagacatcccagccaaccgatatgatctcctctgcttggaggggcttgtggatggactcctagttttccagggaaagaagcctccgccacagtatgtcctgaaaaagtatgaagactgtcattctctgcacttgacacctgcaacaggacagatcaggccatatgcagtggctgctgtacttaaaggcatcactttcactaaggaatcatatgacagcttcatagatctacaagacaagttacatcaaaatatatgcaggaagagaacactagtggctattggaacacatgacctggacacaatacagggaccctttgtatatgatgctttgcctccaagtgagatcaagttcaaggcattgaatcaaaccaaggaaatgactgcaccagagcttatggagctatattctacacatgcccaattgaagcagtacttgggaatcatcagggacagtccagtgtacccagtcatcaaggacaagaatggcatagtgctatccatgccgcccatcatcaacggagaccattccaagatcactttggacaccaaaaatgtgttcattgagtgcacagctacagatcttactaaggcgatagtggtattagacacgatagtgagcatgttctcgaagtactgcagcaaccagtacgaggtggagcagtgcaaggtgttcgcgccggacgggacgtacgagctctaccccaagatgtgcacccgggaggaaactatcagcgtcgagaaggccaacaactatattggtattagtgaaaccggagagaatctagcgagtcttctgtcccgcatgtgcctgtcgagcgcggcggacggcgacaccctgcgcgtgcgcgtgccgcccaccaggcatgacgtcatacacgcctgcgatctatacgaggacatcgccattgcctatggctacaaccgcatagtccgccgaccagcgcgggtagtgacgacgggtggacaggaccccatcaacaaactaaccgagcaactccgacaagaatgcgcacacgcagggtacacagaggcgctcaccttcacactttgttcccgagatgacgtagcaacgaaattaggagttaaaatcgaagatgtgccagcagcacacatttctaatcctaagaccttagagttccaagtcgtacggaccttactactgccaggcttactcaagactttagctgccaacaagaaaatgccactaccaatgaaactgtttgaaatcagcgatgttgtactgcaagataaaaatgctgagaccggtgcccgcaacgagcgccgcctgtgcgcggtgcactgcgggcgcgcggccgggttccagttcgtgcacggcctgctcgaccgcgtcatggcgctgctgcgggagccttgggacaaggacaccggctactatctcagacagtgcgaagatcccgcttacttcccgggtcgctgcgcggccgtggtgctacgtggcgaggtgatcggcaaggtgggagtactcagccccgccgtgttggctgccttcgaactcaccaacccctgctccgcgctcgagatcaatatacaacccttcatttaatttattacacagatttatcaaccaacatacata

SEQ ID NO: 239 - DNA, 1219 bp, Spodoptera frugiperda
  misc_feature (1)..(1219): Gene targeted: twi; Universal ID: GS918
ggggcggaccggcgcgggcgcaggactcagtgtcggggcggcagtcttgctgcgcttatcattcgcgcatgttggtccgagacgcgtgttctgtttcttaaagtgacgcattatgaattacgaaactcgtgatactcgaccaatgccaataaagctcgaggaggatctggaatacccggaggacgacgagcattactatggatacgcgccggtggaggttgagaggcacgctgagccggcggggttcgcgccttcctcgcccacacatctgatggacctcagcaacgggtccgagcgacccacacaacaacatccttggccgtcaagtgtcgtgttcgacggagaggatcgcgactaccaacaaccatcttacacatccttcgagcaacaattcatcgatcaacgacaaagacaggtcccaaggagctactactttgatgattccaattctcaagaccgagtacgaagttactacgagtcgggtgatgttccaaaaatgggagaagtctacagaggtgcagacgacaggagagaggagacggaggaacaaaggagatcgaggaaaagatctaaagcttcgcggaagaagacacaatcgtttgaggagatgcagatccagcgagtgatggccaacgtgagggagcggcagcgcacgcagagcttgaacgaggcgttcgcgagcctgcggcagatcatcccttcgctgccgagtgataagttgtccaagatacagactctgcagctggcgacgcagtacatagagttcctgtatcagatattgtcgaacagcgagtcggcggggagcagcgacagtaacagcgacgcgggcagtgagcacggcaagtacctcgcgcaggacaaactcagttacgccttctccgtgtggaggatggagggagagtggacacacggacaaacgtgatacaccagttaccgtgtactcctagggaaacttgaaaagacgcttatattattccattgtaggtattattgattctgtggcaagtgatgtgtaaatggtgaacaaattagttcttaattagtactagtaaattgaatatgtgatagttaattaagtggattagggacttaagctggcattaactgttgataatttatattaagtgtgaaacaaagacgatatttagaattaatgatttatttgattaaaattgtagtggcaacaatacatacagctgtataccaaaaacttgagtaa

SEQ ID NO: 240 - DNA, 2034 bp, Spodoptera frugiperda
  misc_feature (1)..(2034): Gene targeted: mbc; Universal ID: GS920
ggcggcggcggcgcgccagctggacgcgctgctgcagtaccgcgccgccgcgagacgctccgccacgccgcaccgcatgcatctcaccacctgcgtgctgcacttctaccagcagatcgagaggccgcatatgtatatacgctacgtccacaagctagctaaaatgcaccacgcagcccagcagtgggctgaagcaggactgtccctgcgtctacacgccaagctactcgcgtggagccacgatccgttaccgccgcggctcagacatcccactgttgaacatgatagtcatactacgcatagggaattgaaggaatacctatacctcgtaatagccgacctcctaaaccgaggtcgtcaatgggagttagcggtggagatagtgaaggaactagtatcagtatatgaagaggaagctctaggctacgggcctcttgcagacttacatactcagttggcgagcatgtatgatgccatgttgaggacgcccaggtcccatccagggtacttcagggtggtctatcatgggaagggatttcctgagttgctgaggacgccttatggctacatataccgtggcaatgaatacgagcaactacaagagttcagagaccggcttctagacgaatggcccgatgcagaagtgttgccgaagttagatccacccggaccggagatcacggaatctgatggacaatatttacaaataaacgccgtggatccagtaatgggcgacaaactgaagcgtctctccggcaagccgatagcggaacagatactgcagtactacaagcataataatgtcgacaaatttgagttctcacggcctttttatagagcagaagaatcgctggacggctcaacggatgacctatcaaatcaaaacgaatttgcaactcgatggctggagagaacggaactagaaattagtgagaaattgccaggtattctccgctggttcccggtgcggtcgcagcgtacgtacgaagtatccccgctgacggccgcagtggaagcgctgaaggactccaatagaagactgaagtcactcatcattgaggcacgagcacctgacgcaccgctacacccacttactatgaggcttataggtatcctagacccagcagtacagggcggtatagtgaactacgagcgcgcgttcctgacgccggcgtacgaggcaaggcatcccgaccacgcgcccctactcactgagctaaaggacttgatcgctgatcagataccgctgttgaagtttggtttggacgtgcacgggtcccgtgtgtccgcggacatggaggagatgcaggcacatctcatgaaatgtttccgaagggtacagcaacacgtgcaccagcgatacggacggaagaactgtgacatcgaagtggactcgcccgaagtacagctacggatgccgttccgcgacagtttcagcatggactctagcaacaactccaataataggatgtctgatatatctactggcactgaaacatcgacgaaaggaaggttcttcagtttcaacgctgctatcaatcctttgactaggaatagcagtacgggagtcgtcagtcgctttgcaaccttgcagagttcaccgggcagaagaaataaacggaatcttagaaagagcgaagtgggcacccaagcaagcggttcacaatggtacacgtcccacgcgacgccaaacggctcgttaaacaacagcacattaaccgtcaacaacacatcaatcagcaacaacaacaacagtataacgagcatcaacacacagaccgacacgccgtccgcgtcacccttacgagaattgaggcaagaggtgagaaaagtttccaaggtaaattgtatccctgaggaggttcccaccgaaaggttaataattaaaaagattcattacaatctggtgaccgagcgcccgctccgtgccgaagtggagcgcgaacgaagactgtcccaacgaactagcctcatcacctcctccgcaccaccctcgaaccgggactccgtgggaaccaccgattccaaccaaga

SEQ ID NO: 241 - DNA, 4016 bp, Spodoptera frugiperda
  misc_feature (1)..(4016): Gene targeted: psc - posterior sex combs; Universal ID: GS868
cgtagatattacaaatcattgatcattaatttgtgttgtctcgcaaatataaataaaccagtgttaccaacttaatcgactttcatggcgatacgcgatgcgacgaagttgagtcttccagtttgtaaagataatttgcaatttaattaattactctacgattgtaatgagtttccaaataaactgaaacgttgtgtctacattgtagtagtggataattacataaaaacatcaaattatgctgtgtctactagctggacagttaacagctacgtgtgcccgtacattatttttagagtaatagtggtttgtgaaaatggtaacgtctaataaacagccggataagaaaatagtgaaaatggcagagcaaaacactgtggctgttgtgccccaaaggaccttgctaggtgaagtcaatgaacatataacatgtccgctatgtcgaggctattacatagacgcgacaacgatcgtagaatgtttacactctttctgtcggagttgtattattaaacacttacgagcgaaaagctactgtcctgtttgcgaaatgatgattaactctgccaagcctaacatcaagctagacaaagcacttcaggacattgtgtacaaacttgtaccaggactgtttcaaagagaaatggaaagacgacagcagttttattcttcacgaccaggtccagctgctactgccacacctgaacagagaggtgaagatacagaaagaataattttcagtcctgaagatgtgatctcattttctttagaatatgctgatgccactgacactgatagcatatccagtaagtcttcagatagtaatgagccgcaaccagtaccaacaacaccaagaaggtttttgcagtgcccagcagtggtaaacattagccatctcaaaaagtttttgagtatgaaatttgacattgatagtactcaatttgctattgatattttgtataagagagttcctttaccagactactatacattgatggacatagcttacatatacaactggaagagaaatgagccaatgagatttttctatcaaataatagattatgttgctatcagaaatagactatttgaaatcaataaaaaaggttcaggttctggtcatttaagagatagaaaatcaagtccagcattaactgaagacacaaatgttagtagtccagcacctcatttaaatgaccaaggctctgaagcttcttcaggtacggatagtcctatgcctgatgatactactagtcaagcaagtgattctattaaaaaggttgaaaaagcagcgttgcaaagtagtaaaaatttagatgagtctaagaatcttgagagacaatctgatacacctaaaaagaatgatgatgaagttgaaaagtctcaatttctcaattcctttgaattgactgctaagagcatgttaccacttaaatcatcaccaataaaatcttctgacgaacagagcacatctagtgaaacaccaaccaagaaccagtcaaaagaattgtctccaaaagtagaagaaaaagttggagaaacatctaaaaggaaatttcaaacctcacctcatacgccggaattaaaaaagcttaaaatagaacttgaaaaagcaaaaataactaatttagttacaagtgcttctgctactgcaacaacaacaagtgcaacaacttccattcaaagtaatagatctttggacactccaataaaaggaaaagatgttgaaggactctctaagaactcacaaacaccaactactgtcagttcaccatcccccatggtaggtcctccaaaagaaatgaaacagcaagcaatgagtgcaaagcaacaagaaggtcctggagtgaaaagaactgtatcactaccccaaaatacttcatctccaaaacggaaaccaccaaatgatgctcctctggctgcacagtctcaaggacctcagaaaacaatttctccacttaaattacagataccaaagccggaaacaacaacagccaatcaaaaacagccagaagtacaaaagccttcagtcaaaaagatgcctgatttaaagcctagtgttcctatgtctaacaaaggacaacatatcaataaagtgagaatggatctattagctaataatagtgatccaacaatagatagaagtaaaatattatctcaagttcaatcatcacttggttcaccaatgtcaggaagtccacaatctggtgatcctttgaagtcattattagatacatgtaaaatgagaataccttcttccctatctattacactaactgatcaaaaattagatgctcgtaatgttgctgaggtagcaaatacagatccgaagaaaagtatggtaaataaaaacctggctggtgctagtaacactgcccataaagtcccaagccctccagttcataattatatagaaatattaaaattaccagacactgatccaaaaaataaaaaaggagaaggtgctaatgagactaagccaagtcaagcaggtaaaaatgatggcactgcaactccaaccaaacctccaacaaagtcatcagaaagttcagctaagggcccagttccaaacttgaaacctattgctgatacaaaacgaacttttcaagaaacttttgaacaacagttaaaaagcttacaagctgataaaaaatccaaattaacgaaaaataaagcacaagttcccaaattggtgcctgcaacccctaaagctattagtgctgcaaataagtcaagtaattctacaaacaagccaagtcccaataacatgcccatattagagaacaagcctagcactgctctagatttatctactcctcataacttacaaaatcagtttccacaacaaaccttacataaggcctttgaaacaatgcagtctattgacagtttggctaagaaacagagtctacctaataaaggcattcctttgagtatgccacaaaacaatgttttctctagcagtattcctaacagaccactaaactcaggggtcagcccattaagaattccttcaacatctaacttgggtcagttaaaattggacaaaaccagtccacagctaagcaacagacaagaaatgtctggcaccaaaataaatccaatgaaaccaacaaatactggtaattccaatgttccatctccaaactttcaaatggctcatacatctcctagtgcaacacaaccttcgcctaggtctcaaacgcgttcccctagctcttctccaaaattagtaatagctgaagaaaagcaagcaggtagctctggttcagaacaaaatcagtcagatcagattacaagtactcaaatacccagtatcaacacaaataatgaacagttggcagtgccacctgggacttcaaaagctggactaaaacctatgcttccagctggaaggataccaggaataagacaacctctaccaacaattcaaaaaacaagtcctttgcctaacttacctgattacagactgtctcaagcacgacaacctttgatttcaccccaacatgtgttattaagacatcatatggaagtaaatgcgtggatagaagcccaacgacaattggagttgatcaagagtatgtcaacaaatattgctcaccagtcacagaatgacttcaacaataaggacaaacagtaattagtttttgctacccaattaacaattaattacttttacatggcacataagattattaattaaaaagtcagaaattcttagtgatattttattgtaagtgatgtaatgagtttgactaatttataaaagctcataatatgaaattaaatgagttgatgaaattatgtattgtaacatgtgtgtttgtaaccataattaatgctgccgttacttgtaaattttgtgtcaaaagtactccatctgtattttcaattaattttgattcaataagcagtgataatgcatcaaataacatacttatgacctaagtgtttgtaatgtatattttgatcaaccaaagtttatattacaactctggaaatgatactatggctgc

SEQ ID NO: 242 - DNA, 3120 bp, Spodoptera frugiperda
  misc_feature (1)..(3120): Gene targeted: Upf1; Universal ID: GS872
ctacattgtaataatgcgagcagctgattggtgttatcgttccacatacacatttgcaccaattatcaatcagtttgtaaacggaaacaaaccatgtgctaacatggcgatttttcatcgttcttcgcatgtcgtttgataattattgcgtggctgttatgggaatttggtttaatcgtgcaatattttatctttttgacacattttctttgttttgttcaatataattatatcggggaaaaatgagtgtcgacgcttatggaccgagctcacaaacactcacgtttttggatactgaggaagcggatcttattggggctgatactcagggctcggaattcgaattcaccgacttcacccttccatctcagagccaaacacaggcctcccaacatgatcatggcttgtcatcttcaaatcaggtgaacggtttgggtcgttctgatttgtcatcgaaagtgtccaatgtgactaatgctatagcagagttgcaatttgaggaagaagatgaggccttgtacagcaaggagttgcctgaccacgcgtgcaagtactgtggcatacatgatccggccactgttgtcatgtgtaacatttgcaacaagtggttctgcaatggtcgtggtaacacctcgggatcacacatcatcaaccacctggtccgtgccaagcacaaggaagcagccttgcatagagacggcccactcggggagactctgctggaatgctactcatgtggtgccaggaatgtatttgttcttggctttataccagctaaggcggattccgttgttgtattgctgtgccgacaaccatgtgcagctcaaagctccttgaaggacatgaactgggaccaagagcaatggaaaccattgatttctgaccgagcctttctatcttggctggtgaaagtcccttctgaggcggagcagatgagagctcgtcaggtgactccgcagcaaataggacgcctcgaagagctgtggcgtgacaatgtggatgctaccttccaagatttggagaagcctggagtcgatgaggagcctcatcaagtacttttgagatacgaagatggttatcaataccagaacatctttggtcctctggtgaagctagaagctgattatgataagagactgaaggagtctcagacccaggaaggcattgaagtccgttgggatgtcgggcttaataagaaaaccattgcatacttcaccctggccaagacagatagtgatatgaagttgatgcatggagatgaacttagattgagatatgtaggtgagctgcataaagcgtggtcgggtgtcggtcacgtgatcaaggtgccggacaactatggcgatgacgtcggccttgaactgaagagcggcgcgggcgcaccactagactgcacctccaactttgtcgtagacttcatttggaagagtacttcttttgacagaatgcaactcgctttgcgcaagttcgctgtggacgactcctctgtgtctggctacatctaccgtcgcctgctgggacacgaagtggaagaagttctgttccgcgttcatttgccgaagcacttcagtgctcccaacttgcctgacctcaatcggtctcaggtctatgcagtaaagcatgcgctacagcgtccactgtctctaattcaaggcccgcccggtacgggaaaaaccgtgacgtcggccacgatcgtataccaactggtgaggcagaacagtggcccggtactagtctgtgctccgtccaacaccgccgtcgaccagctcactgagaagattcatagaactggcctcaaggtcgtcaggctttgcgccaagtctcgtgaagctatggagtcctcggtgtcatttttggcactccacgagcaagctagggccttaggctccgctgacagcgagctcaggaagctgactagattgaaggaagaagctggagagctgtctgcggctgacgagaggagataccgcgctctgcgccgcgctgccgagcgacgtctgctggacgctgccgacgtcgtctgcaccacctgcgtcggtgcaggggaccccagggtcgcacgcatgcgcttccagtccatactcattgacgagggcatgcagtccaccgagcccgagtgtatggtgcccgtcgtactgggcgcgcgacaactgatcctcgtgggcgaccactgccaactggggcccgtagtcatgtgcaagaaggcagccaaagctggcctcagccaaagtcttttcgaacgtttagtcgtcctcggtatccgtccattccgtcttgaagtccaatatcggatgcatcctgaactatctcgtttcccttctgatttcttctatgaaggttctcttcagaatggtgttagtgctgaagaacgtcgtttgcataaaattgacttcccatggccgagacctgatcgcccaatgttcttctatgtaactcaagggcaagaagaaattgctggttctggaacatcctacttgaatagaactgaagctgctaatgtggaaaaactcactacacgatttttgaaagctggagtacgtccagaacagattggtatcattactccttacgagggtcagcgatcatacctcgttcaacatatgcagtatcaaggaagtttgcatgccaaactttaccaggagatagaagtagctagtgtagatgctttccaagggcgagaaaaagatataattatcatgtcttgcgtccgttccaacgagcaccaagggattggtttcctgagcgacccacgtcgtttgaacgtagctctaacacgcgctaagtacgggctcatagtagtcggtaacccgaaagtgttgagtaaacagccactgtggaatcatctgctagccttctacaaggaacgtcgagtcctcaccgagggcccactttcaaacctgaaagagtctgccatccagtttgcgaagccaaagaagttggtgaacgcgcagaatccgggctcgcacttcatgtcgacgtcgatgttcgacgcgcgcgaggcgctggtgccgggctccgtgtacgaccgcgcgcgcgcgctgcgtgacccactggcctacgtgggccccgagcgcgccgcgctactacacgcgccggtgccggccgcagccttctccgcgg

SEQ ID NO: 243 - DNA, 4126 bp, Spodoptera frugiperda
  misc_feature (1)..(4126): Gene targeted: sr; Universal ID: GS870
gtccccttcgcaccggccacgcgagaggccgttttcacgctggcgctgttcgtaattccactcggcccgtgggccgaggagcaggtggtgccggacgggatgggcactgatgcggatcacccatccggcccgcacctgctctcccttgctgatgtgggcgcgctcgggttcgactgcgcgctgaagccggtgtcgacgccgacgcctgcagccggcacgccgaccgacctgaacacgcctgtcaccacgtcggacctgcccgccttcttcccgacgctgctcgagccgccttcgatatcaggtacactaacgggcgatgagctatcgttagggtgctcgccacgtcgacacaagcatgaagcttcgttgtccccgggcgcacgcgccgaggatgctagcaatgcgtctagtgcaagcgcatctctatacgggccgccagccggcagcgccggcaagcgcgcgccctcgccacccctgcagtggctgctgccgcccggccccggccccggcagcgtcgacaagtacttccagcaagagtacgaggagcgcgttgagctgctcccgccagagtgccaaccctactgcgcgccgtcgcagccgtgtccaccgccgcagcactgcgaataccgccctccgccgcaaccacagcaacagcacacgtgggagacgcaggagtacgccagtgcgccgcagcccactccgggaccctccggccttcctaagcgggagccgtacccgagcccggccggccctagcgacaggccagtgcagctagccgaatacaacccgtccacgagtaaaggacacgagattctttctcaagtatatcagcagagtgcgcaaccgctgcggcttgtcgcggtcaaaccccgcaagtatcccaacaggccgagcaaaacccccgtccacgagagaccatacgcatgtccagtggaaggctgcgaccgcagattctcgagatcagacgagctgacgcggcatatacgcatccatacgggccagaaaccgttccagtgtcgcatctgcatgcgctccttcagcagatcggatcatctgacgacgcacgtacgaacccacacgggtgaaaaaccattcgcgtgtgatgtgtgcgggcgcaagttcgcgcggtctgacgagaagaagcggcacgcgaaggtgcacctgaagcagcggctgaagcgcgagcgcggcggcggcggcgcgcaccaccacgagcacgggcacgcctcgctctagcagtcagccgccgccacggccaccgccgcgcggccctcctcggagtcttctgacgacagtgacaacagtggcggtgactcttacacggacaactgaactttttatactttcacgttgaaattatcgaatgatttcatcgcttaggtgtaaatgaattgtctttaacaaagctttattaactctacatttgtaaattcactgaaatttatatatatctttttatacatatttgtaattactatggtaggattcgatttgctcgatgtatttatttaattagataggttaattgaaaaactgactgggaacaaacgtagatacgaagcgatgtggcctaatgtgtccagtgtgtgtgtcgttacgtttctatgcaaagagaactttgtcgcctcgagtggtgattagagtcactgtcgtcctcggcattatgtgaacacatatctttctgtctgatggcagtccaatggataggcttagcggtgtctggaaagatattctcttgttatgctatcgattagttgtacgttgttgtagtattacgagaagtgaccgttttgttacggagatgaactttacaagtaacttgactgaaaccgtcttcttgacatcgacagtcgacagcgggaactaattgatatctaagtaaataagtatgtgacaaattttgggggtaaacctactctgtctagggtacctaccgagtgtgtgggtatatgtatgtaatattcttttgtttgacaaactaacgtgaaactgtgccattaatttaactttataacgtgccactgcaatttttatttttatttacataattatgtaattaaataagtataacacgactgctgaataagtgataactatgattatttcgttatactatatttctagtcgaagataaagtataaacgcgaggatgtcgactattatgtttgtgtttagataatataatgtctgccattactaaccgtaggtatatacatatatatatttacgtttcgacagctgctgtcatgatcttctcttgctcaaacgtttaattttactaaatttgctcaagtctgcttctggtacatattccaagtgatatggttcctctacgtttccactaatgttctttgtttcgctcacaccatgtgttgccctcttcgtgcactcgttgttcagtaatttcactatgatatgaacttttcccagtggcatatatttttatagtgtacgtattattacatagactaatctagtaaaagtttagcatgtagcgtttaaattatgatctcttaatcattaataattattttcaatcgtagtgaaggccctttatttataatactcataagtttctgtatagttgtaactatgtgtaagattcatattttggatttcagtaactgtgatgacgatgttacactgtctgctaggggcgcggtcgccgtcgaccgctaggttcctaggtaaattattattgtctactgcattacttacaaactaagatatttttgcattatattcaattgttattaactaaataaggtatcctatatactgtagggtttcttattcgttcgttcacttatataatatttacgaaaaccatttcgagtttttaagtaatgcggtttcaaaacttaaatgttgtctctccttgtttttctcattaatgttaagcacaaaatagtcgtagctttgacatttcataaatacagtaaaaatgtttttatggaaccgcctttgtaagtcttgatacttttgtacaagttccatgtaaaatatttttgttgggtacatacataatactagtacaaacatcatgttcttagaataggaatgtatcacaaacagcgcagtcgtaacaatccggatataggtacaacagactgttaaagtttcaccgaataaaccgtgatagaactacagggtgggcctttcagtaacgtcggtcattatgaatttaagaaatctgacaataatattgctaactcctgcgcctgcaatgtaacccactaactgttaatgggagcggttcaatccaccgtgcacagatcatcacatttactctaacatgtgtttgtcatcagttgagtcaactatcagagcatttaaatggagcaaacagccagcacgtaactttagagcgccgttcccaagttatccagtcgcttacgaagcctttgtaggatgtggcagcgagagcacgcgcgtgcgccgcgcctgcgtgcgcacacgggcatgctcccgcgcttcaatagaatgtcgtgtacgagtttataatgtttttactgttatagaagagacgaagtctccgatagacaaggctagagtagataggtattataaatcgtattcatgttaatcaaacgagtgaaattgaaacggaaaagactaaattcttacacattttacataatgttgcatcgcgttcgcgttaacgttattgatatacggtgtttgtattaggttacgagttacgacttgcccattgtttgcacccgccggcgaccgcctcgcggatgcgccagcgggtcgggtggtggtggagcgatctcgcattgttgcattatgttttacattcacacaatcccgtgcttcgatcacacgaacacttcatcttaatatacctagctcttaaaggactttcaacaaatacgatatctaacttttatggtgttcacctgatagtgaatggaaaacgaattctttatgaaattgtggatgattattgtttaagctattttatgtatttcacccgagtgaaagatgttgttgatgttctataaatataactagttataagtaggtattgttaaatctcactaatttttactaaattctatttaattaaaatatttgtaaatacactctgactaaatttgaatttaatgtgtatataaga

SEQ ID NO: 244 - DNA, 3409 bp, Spodoptera frugiperda
  misc_feature (1)..(3409): Gene targeted: Fit1- Fit2; Universal ID: GS867
gtctggcgggtttgtcggacgtgcgtcaataatttattcctaactttgtggccgcgactcgcgatgctccttcggaagtgacattactttattgtgaagtgtaaaagaacttgtgaaacatgttggcggacggtgaagttgtcggcgatgggtcgtggaacctcacgatctacgtgactgacttggacgagaagaggacgatggtcgtaaagggagacatgcatattggaggggttatgctaaaactgacagaaagcttcggtaaagaattcaaaaaggactggtcagatcacgcactctggtggccaacacgcaacaaatggttgtctagaccgaagcacacattggaccaatacggagtccatgcagacgccactctccacttcactcctatgcacaaaccaatcagaatccagctcccggacctcagatacattgactgcaagattgacttctctatagacacctttagcgccgttgtacagctttgtaaaagtcttggaattcgacacccagaggaactctccctctgttatcccctagaaccctcccatcttaaacaaaactaccagaacttgaaggaagcgaaaaggataaagtcgcctccagacaccaacacgtttatagcagccaccagaggctcttcaaatagtttggacaggtctaatggaccttgtcctgcgacaccacctccgccacgatcactctctgctaccccggttgcacaacaaaatggcacactccgtcgttacggtggtttgtacagcacacagagtgacggctcaagcgatgggggatacggtagcaccccgcctagggctgcctctctagacgccctagattctctagccgagctgtctctagcagactcccccttagagcccgacacccaatcacgagagtctctattaacgcccaaatctctcatggaacgtgctagaatgaatgtcggttggctggactcatctctgtccataatggagcagtacgtccgagaatggaacacgctacagcttcgcttcaagttctactcgttcttcgacctgacggcgcgtgcgcaggatgcggcgcgactgaaccagttgtaccagcaggctcgttggcagatactgaaccaagaagtacagtgtactgaggaggaaatgcttttatttgctgcgttacagctccaaatcgagttacaaacgttagccggtggtagtttggatgcggcggatggtacagccacgtcccaagcgaatgcgccggaggacgaaatagatgcggcactctctgccttacaaactcaattggaaggcggacccgcgccacataacgatatcacacatgtacccgaactcgcttcctatcttaagtaccttaggcccaaacgttttaccctgaaggcgtacaagcgcggctgggtgtcgtgtcgtgacggcgtgctgcgcatccactcgtcccgcgaggcggctggcaagggcgagcccccgtcctatgctgtcgaactgcgtggagctgaggtgactccagacgcgcaccccgcgtccggccgctacagcatcaagctggaggtgccagccgaggacgccatgcacgaaatgtggctcaaatgtgaaaatgaggatcaatacgcggaatgggtagcagcctgtcgcttaggttctagaggtcgttcgctagcagactcagcgttcgcgacggaggctgcggccgtgcgctcgctgctgcagctgcagcggccgcagcccgccgccgcgctcaaccagcactcgctgccgcatctcgaccatctgcagcccgagaactacctcgcgccacgattccttaagaagctgaagagcaagttcacacaacgcgtcctcgaaagccacgcgaacgtaaaagacctcccactgctcgaagcgaagctgcagtacatcaaaacgtggcagaacctgcgagactacggacagacgatgtttgtcgtccgcttcatgggacataagagagatgagatcattagcatcgccaacaacaggatcatgcggctcgaccctaataccggggaccatattaagacgtggcggtttagtgatatgaaggcatggaacgtgaactgggagatcaagcacatgatggtacaattccaggaaggcaacataatattctcagtgcagtccgcagactgtaaagtggtccacgaattcataggaggctacatcttcctctcgatgcgctccaaggatgccaaccaaacgctgaacgaggatctcttccataaactgacgggaggatggacgtaaaactgactaacaaccttagtacagtaagcccatacaaatatttaaataaaccacacttcgacaaccctgttagaccgtttacacactacgccgctccatacaaattggaggaaagctagtgcagtggcactgcggcggtggcgctgcgcgtaatgtgtaaacagccttatagataagagagtttatatcttaacgtgcaagatttaaaacctagtttcaagtaatataatatttgtacaacatgattaataaatatttaattagatacgacggagggccttcgttacgtgccttgatcatgtgctaaactttggatagtgtagaaatatttttgtaccaagaaaatgcattcgtaataatcttatttcttcacaaaatattgttttctagatctaattataatagtgcttccaataattttcgtatgtaaatgccaaatacattgacaaaataaaatgcttttcatactttgcatcacttttatttaatagtagaatttaagaaacatgcgacggatatgagcttttaaataatgtaagtttttgtttttaatatttttttatgtaacatagtaacattgggtccttgtagtgccattgtgacataataacatggatgtcaaatgatccatttggtgctgtatcattcaacataacattgagtggccttaacatattatattatgatacattataagatatttacgttctatttaacttcataaagttcttataaaatgtgtagaaaattaaaaactattttcaaaaagaactttatgattgaaatgtagatttacatagtttatgaaactgctaaattaggttttatcaatctgaaaatctcagcgatgcttaggttttttttaaagtcagatttatggtataaaatgcctttttggaagagtttcataaactactatagttcattgtaaataacattattttattttgcacttaaatactgaaataatacataacttcgtcttcatagattttctacaatctgtcttaccgctgtactcagagtcatttaatggttacttaacccagtccttagcaattgttttaggaacaaaatcgatactaaggaatagtttaagttatcattaaatatctttgaatgcggcagttacttttaaacataag

SEQ ID NO: 245 - DNA, 1920 bp, Spodoptera frugiperda
  misc_feature (1)..(1920): Gene targeted: RRM domain-containing protein; Universal ID: GS869
gttgtgttgatcagttgtccaacaatatttgtgtcgtttttccgtgttacttactataaatagaacaatattataagaaatttaaagcaattacgagaagttaaaagtaatataaatccaaacctccaaaatggatagagaagacggtgaaatgagtgatgataacgcaatggtggttgatgatgtaaaagaaccaatttcatacactgatgattgtacactggtgtacaaagctgacaaggcaggattaatcgtagaaaaattggaaaaagtggatgcctctaagatagaggaacgagcaaaaagatttggtttaaatcttacaggaaatagagtaattacacagagacagattgatgaactttattccaattttggtatagaaagtggaaatgagagacattttcgtttcgatgcaatcaatttgcatggagttgatggactttctacaaaggaaatatttcaatatttagaagactacaaacctgtatctttggaatggattgacgaagtatcatgtaatattgtttgccaagatcatatatcagcagccttggcattattagtgcattctcgtgaaattaaagatccaaatttgaaggaaatgcttgctgctaatccaaatcatcattggcgtgaaggtatgccacatcctaaaaaagatcttattttaatgagatttgccactaatggagacaagaaaatgaacaagaagaaacttcagagtaaaactacagatgaatatggtgatcaaaatatggatgcagtaagtaagaacccttggggtgacttgtgtaaatcttggggagtttatgatcatcaagaagtatttcaacgaaagcctaggtacaataatgatgaagatgatgatgtagaagagccagataaaattgtaaaaatcaagaataaaagtttagctagccgccttggtaaaaggccagctactagggacaactatagcaatgaagaagctgaggcaagtgattcagattctgaatggaaaactaaatcaaaggcacctcgaatgagaatgcatgcagatgatgaagagtctaagcgaaagagaaagcaggcatcccaattatccaaagattcagatggatattccgcattgtcaattgaagtagaaaactcccacagcaattataagccaagagatcatacaatcatatctgacaagtttaaaaggaacactgtgtatagaaaaaaacatggtattcagtcaaggttaggtgataaagtaataactgtggaagataatgaaagtttttcaagtgatgaagtgtcagataactcggatagttatgtcatgagtagagtgcataaagttaattctagtaataatagtgtatggtctaggttagatagaaaacctactggaactagaaatacaagtgatcataatgatttacgacaaattttgaaatcaaagaaacatgggaagtctgatgacctaagagacaaattaggtaaatctaaacaaagtaacttacgcattgaaattgacaataattatgcacatgatgatgatgatgatttatagtgtttattgtgggattattatatattagaaatagtgtactccatttattttgtttttaagatgttagctccaatgtactgcaaagcaattgaatttgtacataacatggtacataaatacataaatgtatctacagtgttgtttataataccaatgggtattaacatggattctctttagtttgtagatatataaatatttagatgataaatgcattcttgtcattggtcagtgcaatttatagaaatatcacactaagcactaaatgtgaggacaattactttcttctgtatatgtggtaaatgtcatatgaaagtttacattcatacttgttgaatgaatattttcattttaaagtatgaagttttaccaccggc

SEQ ID NO: 246 - DNA, 863 bp, Spodoptera frugiperda
  misc_feature (1)..(863): Gene targeted: Tc croc; Universal ID: GS866
tttgttgccgtaagagcagcgcgtcggaggttccgcgctttcgggttgagcatgttgcgacagtgaacgtagccggcaaaatgcacgcgttgtttggtgaacagagcccgtatgcgtatcgtggaggagccgccggtggttactcagccggtgtgacaccttatgcctatgaacaataccgctatggatatggagctccctaccttcacccccatcaacagcatgttggtgcaccaaaagacatggtcaagccgccttactcttatatagcacttatagctatggccatacaaaacgctcctgaacgacgtataactctcaacggtatttaccaatttattatggaaagatttccttattacagagaaaacaaacaaggctggcaaaattccataagacacaatctaagcctcaatgagtgctttgtgaaagtggcaagagatgataaaaaacctggtaaaggcagttactggacgcttgatcctgattcatataatatgtttgataatggctcgtacttacgccgtcggcgtcgctttaaaaagaaagatgcgcttagagaaaaggaagaagctttaaagagacaacagcagttacaagaagctcaggaggcactcactgcgcaggaagcactgactgcatcggacactctaggacaacaacgtgatgttaagcctgatgtcaaaccaagaatcttcgaatgtcgaccgaaacgagaacccggcgcagactgtgcaagatatgacaagcctgtcgacggtcttgatgacttcagtgaacctcgacttccagcatccgcagtttattgttcacctcaaccttattcgttggtggccgaggaatttcgtgccgctacatcaggg

SEQ ID NO: 247 - DNA, 1404 bp, Spodoptera frugiperda
  misc_feature (1)..(1404): Gene targeted: Protein kinase; Universal ID: GS877
ctatcaataattgtcgattcaataagaaaactatattatatttgctaatatcttgtgattctattcatgctatttgacgattgagaaattttaaaggatggaagaagagcaatgtttacatgagtgtgaaaattatattcagagtcataatatttcttcattgttaaaagattgcatagtgcaattatgtgtgaataagccagaaaatcctgtgtcttttttgagacaatatctccaaaaattagaacgagaacaagcaaaggctgctcaagctgcagcagctgcatcagaaggtgaagcagatggagaactctctccactgcctgtgcctgggggacagccaccgcgcagacgtggtggcattagcgctgaacctgtaacagaggaagatgctaccagctatgttaaaaaggtggtgccaaaagattataagactatgggtgctctttcgcgagctatagcttcaaatgtactctttactcatctggatgaatctgagagagcagatatgttcgacgctatgtttccagtacagtgtcttcctggtgaaactgtcataaggcaaggagatgaaggagataacttttacatcattgattcaggagaagtagaagttttagtaaatggtgaacctgttacaactattggagaaggaggcagttttggtgaattggctctaatatacggcaccccaagagcagcgacagtgcgtgcaagaactcctttaaaactatggggtttggatcgtgattcttaccgtcgtatacttatgggatccactataagaaaacgacgcatgtacgatgaattcttatcacgcgtctcaattttagaaagtttagaaaaatgggaacggctaacagttgcagatgccttagaacctgtatctttcactgacggcgagatcatagtcaggcaaggagaacctggcaatgacttttacatcattgttgaaggaactgcagtggtgctacagcaaagaagtggccagggagaaggttcggcagtagaagtaggtcggctgggaccttctgattattttggagaaattgcattattattggacagaccacgagcggctaccgtacgcgctgcagggtctcttaaatgtgtcaagttggatcgtgccaggtgaatatattatatctcgttttagctaacgtgtttagagatttaatttatataaccatcgaaccattcgctcgagctagtaaagccatttggataacacaggatattcaatagtagcttctgcctgtgtcgccgccgtcatcgtgggattaaaagtagccaattttttattccagaccatactccatccatggtttcaaatttcatcccactttgacatgattgagattgctgctttgatgtgattgattaactaacatacgcacgaattcg

SEQ ID NO: 248 - DNA, 1638 bp, Spodoptera frugiperda
  misc_feature (1)..(1638): Gene targeted: Arp3; Universal ID: GS876
gttctacacacgtcaaaattcgtggacccactgtgattgtaccgcacccactaaagttttccttaaaattttgctgtaatttgaaatagaacagtatttagtgaaattagaaatatgggtgatcatctaccagcttgtgtcatcgatgtcgggacgggttacacgaagctgggctttgccggcaacaaggaaccgcagtttatcattccgtcagccatagcgataaaagaaactgctaaagttggcgatcaaagcactcggcgtatgactaaggcagtagaggacctagatttcttcatcggcgatgaagcgtttgacgctaccgggtactctgtgaagtatcctgtacgccacggtctagttgaagattgggatctaatggagcgttacattgaacagtgtatcttcaaatacttgagagcggaacctgaagatcaccatttcttgctaactgagcctccactaaacacgcctgagaacagggagtacctagcagagattatgtttgagtcattcaatgtgcctggtctgtacatcgccgtacaggctgtgttagctctcgctgcgtcctggaagtctcgtacatccgcggaacgtacgttcacaggcattgtagtggacagtggtgatggtgtcacccatattgtgcctgtagctgaggggtatgtcattggatcctgtatcaaacacattcccattgctggtcgcaacattacctcgtttattcaatctctacttcgtgaacgtgaagtaggcatcccaccagaacaaagcttagagactgctaaagcaattaaggagagatacagttacatctgtccagacatagcaaaggagtttgccaaatatgatgcagaccctggcaaatggatgaagaactacaccggtatcaatgctatcactaagaacccattctctgttgatgttggttacgagaggttcttgggcccggagatattcttccaccctgagttctccaatgctgatttcactgtgcctctaaatgagatggtagatgaagtcattcagtcatgccccattgatgtaaggagagggttgtatggcaacattgtgttgtctggtgggtcgaccatgttcagggactttggtaggagactgcagcgtgacatcaagaggactgttgatgcaagactgaagctgtctaccacactgtcagaaggacgtattactccaaagcctgttgatgtgcaagttatatcacacaatatgcagcgctatgctgtgtggttcggaggcagtatgttgggctctactccggagttctaccaggtgtgccacaccaagcaggcgtacatggagtacggccccagcatctgcaggcacaacccagtattcggcaccatgacataaatgtatattgtaattaattgccagtattcagtcaatatgaatgttgactatttttaagcaattatgaatttataattttaagattattttacttaaagagacttattaagtatgcctattttataagtgtaactaaataatagctacatgaaatattggagcatggtatttgtaaagaacttttaattccatcattatgtttatgattatattcaaatattcaatttatgtaaaatgtaatgtcttagctggattttattaagaggc

SEQ ID NO: 249 - DNA, 1489 bp, Spodoptera frugiperda
  misc_feature (1)..(1489): Gene targeted: Actin related protein 2; Universal ID: GS878
cccagttacgggcagtgcggggggttgtacttcgtctgttattttcattaaatatttcaatataaataatattttaagtagaaataatataaattaagtaaaatggatgagaaaggaagaaaagtcattgtttgcgacaacggcacaggcttcgtgaagtgtggatatgcggggagcaacttcccagccttcattttcccgtcgatggtcggtcggccgatcatcagggcggagaataagatcggagacattgacgttaaggacttaatggttggagatgaagcatctaaactcaggtctatgctggaagtcagttatcctatggagaatggagtggtccgcaactgggaggacatgtgtcacgtgtgggactacacgttcgggcccagcaagatgaacgtggaccccaaggagaccaagatattactcactgagccaccgatgaaccccaccaagaatagggagaagatgattgaggtaatgttcgagaagtacgagttcgacagcgcgtacatcgccatccaggcggtgctcacgttgtacgcgcagggactcatatccggagtggtcgtcgactcgggtgacggcgtaactcacatctgcccggtgtacgaggagtttgcgctgccacatctgacgcggcggctcgacatcgccggcagggatatcacccggtatcttatcaagctcctgctcctccgagggtacgcgttcaaccactcggcagacttcgagacggtgcgcatgatgaaggagaagctctgctacatcgggtacaacatcgagcaggagcagcgactggcgtgggagaccaccgtgctcgtggagccctatgttttaccagacggtcgtgtgatcaaagtgggaggggagaggttcgaggccccggaggcactgttccagccacatctcatcaacgtggaggggcagggcatcgctgagctcgtcttcaatactatacaggcggcggacatagacatgcgcaacgagctgtacaagcacatcgtgctgtcggggggctccaccatgtacccggggctgccctcgcggctcgagcgggagatcaagcagctctacctcgagagagtgctcaagaacgattgcgataagttggctaaattcaagatccgcgtagaagacccgccccgacgcaaggacatggtgttcataggtggcgccgtgctcgccgaggtctgcaagaacagggacaacttctggctctctaggaacgagtacttagagcagggtatctcctgcctaaggaagctgggtcctcgcgccagttaatgactgaatcaaatacttaactacttcttatgtatataggcggcgagacggtaccgacataatatattcaatcttattactactatgatattataagacttaaaatagtttgaaagacaccatttttaaatagaaactaatttaactttcctcatgaatcactttctaattaactgctatactcagagacatttaatgatta

SEQ ID NO: 250 - DNA, 1752 bp, Spodoptera frugiperda
  misc_feature (1)..(1752): Gene targeted: TAR DNA-binding protein 43-like Protein; Universal ID: GS865
ttcttcattttcgttttcaacctgcaaattgcaatgggttcataacccgtaggtgacgttaattaattttatttatttatatgacataaaaattgtacatttgtgtagtgataagtttaaaatctgtgtttatttttatcaatttttattaatattgttcatgaataagaaataatgtccttcgagtacttgcccgtggctgaagacgaaaatgaagaacccatagaattaccaatcgaagatgatggtacgttgatgttaactaccgtatcggcgcaatttccgggctgttgtggcctaaaatatcgtcaccctgaaacaaaaatcatcaggggtatcagattaagagaaggcagattgtacccaccccctgaaggatggggtaatcatttatacatatgtagcttccctaaagaatctaagcgtaaaccgggtgaaacttctgaatcggccacgacgaagaacaagcgaaatgacaatctgtgctctgatttgatagtattggggctgccatggaaagccacagagcaaactgttcgtgaatactttgagaagtttggtgaagttttaatggcgcaattgaaaagagaccctaaaacgggaatgtcgaaaggttttgccttcattagatttgcttcttatacttctcagatgagagtgcttgctcagcggcatatgattgatggaagatggtgtgatgttcggatacctaactcaaaagaaggatcagttgcatcaatgccttgtaaagtgtttgttggccgctgtacggaagaattaacagccaatgatttgagggagtacttctctcagttcggggaagtaactgatgtgtttattcctaaaccatttagagccttcagctttattacatttttggaccctgaggttgcacaaagcctctgtggccaggatcatataatcaaaggagtatctgtcaatgtttctaatgcctcacccaagcaaaacaaaagtggttctaatcagcgcactatgcctggccgcaactatgaagatgggcaccctcataatgcatcaaacaataactcatggagcagccgcaatatggatatggtgaacatgcaagctttgagtttatctggacaacacggtcaaactgcagttgctggaggtggtgggcaggctcaaggtggtagcatgcccctcgggatgggaggattaccagtaaatcaagctctagtggcagctgcactaaatcaggctgctggctggggtctcatcaacaacataccgtccggtggctctgagcagggcgcatttgctggtccagcatcttctgcgccgcctgctccacccaacttcctctcttggatgcaacaaggtaattctgcacagggaccctctagtcagtggggacagcggcaccagtcccaaggccactctgtttgatccatcatctggttgaaagctcacaataatttctgtgattgtagcaacaattagataatttatcatttgttttatctacactatacaaaagggttgttctaatggtaaagagagtggtttaaatacatagtttgctactgatgttatttatttattgtggagttgcttgtgtttcgttgatttattcaaacttatataattatattataaataaagtagattacagtatcatggaatgaacgttacacactagataattttttatatgtacattgtgtacatataattagtcttatgcttatatttatcaatttgtgatctaaacaatttccagtatctacg

SEQ ID NO: 251 - DNA, 5756 bp, Spodoptera frugiperda
  misc_feature (1)..(5756): Gene targeted: wb; Universal ID: GS884
cgaagcgcgcgagctcacgtcgcgttgcgctaagatggcgccggccgcatcactatttaccacatttatatccataatactgtccgcaactgcacaggattactaccacacgccccgcattggttccaaacaactagcctcatgttacaatagtgaaggagtgccgcaaagatgtataccagagttcgaaaacgctgccttcatggtccaaatggaagcgacgaacacctgtggtgacaacggcatgaaagtctactgcatacagacttcttacggcacctctactaggtcgtgtgacagctgccaaccagggcagttctccagctactatctgactgacctccattatgagcaggacaaccagacgtggtggcagtcggagaccatgaaggaagggatccagtatcctaaccaggtcaacctgactctgcacttgggcaaagcctacgacattacctacgtgaggattgtgttctactcgcccagacctcagagtttcgccatctataagaagacctcggaagaaagagtatgggagcccttccagtacttcagtgcctcctgccgtgacacgtacggagttcaagaacagagggctgcggagttaggagcagaaacccgcgccctctgcaccagcgaatactccgacatctcgccactctccggtggtaacgtcctcttctccactctcgaaggtcgaccttcagcgttcacttttgacaacagtcctgagctgcaggaatgggtaactgccactgatattcgaatttccctggaccgtctgaataccttcggagacgaaatttttggagacgtccaagtattgcaatcctattggtacgccatcgctgacgtggctgtgggtgcaaggtgcaagtgcaacggtcacgcttctgtctgcgagacccaagaactacctgatggtaccaggacacgagcttgcagatgtgagcacaacacagctggtcgagagtgcgaaagatgtttggacttctacaatgacgctccttggggcagggcttcaccgacgaacgtgcacgagtgcaaggcttgtaactgcaatggattctccaacaagtgtgagttcgacaaggacttgtatgagcgcacgggacacggcgggcgttgcatagactgcgcggagaacagggacggagccaactgcgagaggtgcaaggagaacttcttccaaggatccggagatatctgcttaccctgtaactgtaatcctactggatctcgcagccttcaatgtaacgcagaaggcaagtgtcagtgcaagcctggagtgacaggagacaaatgtgacgtctgcgcaccaaaccactacgagtttaccaaccagggctgcaaaccctgtggatgtaacgagtctggttcctacgccaacaccccgcagtgcgaccctcaaacaggagtgtgtctgtgcaagcagaacgtagaaggaagacgttgtagagagtgtaaaccgggtttcttcaacctagacatcagcaatgacttcggatgtaccccgtgcttctgtttcggccactcttcccagtgcagctcagccccgaagtaccaagcccatgagactagtgcccatttcatcagagatgcagagaagtggatggctgaagatgaacaagaaagacctgccaagcttcagtttaatgccaatactcaaaatattgccgtttcatcacaatcttcggaaaccttatatttcatcgcctcaagtcagttcctgggtgatcaaagaccttcatacaatcatgacttgaaattctccctgcgacttggagaagtacgaggttatccatcagctactgacattatcttggaaggtccacgatcctcggtgtcaattaatatctacgcacagaacaatccggaacctactaatcaggctcaagaatacaccttcaggcttcatgaggatcctcgctacggctggtctccgaccctttcaaactttgaatttatgtctcttctccaaaacctgactgctatcaagatcaggggtacctataacaagcctggagagggttatctcatgaacttcaagctggaaactgctaagattggacgagagaaaggttccgctccagccaattgggtggaaaagtgttcctgtccgaaagcttacgttggggactactgtgaagagtgtgcgcctggattcaagcatgaacctgctaatggtggaccgtactccacttgtataccttgtgactgtaatggacatgctcatatttgtgacactgctaccggtttctgtatctgtaaacacaacacaacgggcagtaactgcgagctttgtgccaagggtttctatggtaatgctatcgccggtactcctgacgactgcaagccctgcccgtgtcctaaggacagtggatgtatccagctcatggatggaagcattgtatgtaccgactgtcccgagggatatgctggaccgaaatgcgaagtctgtgctgatggttacttcggagaccccactggccagtttggacccccgaaacagtgtgagctgtgccagtgtaacggcaacgtagaccccaatgctgtcggcaactgcaataggacaacgggagcctgtctcaaatgtatctacaacactgacggagaacactgtgacaaatgtttgagtggtttcttcggcgacgctctggatcctaagaagaagggtgactgcaaaccctgtcagtgccacgacgccggtacagtggagagtgcggagggccccccccagtgtgacggcctcactggattgtgcagttgccacccacacgttattggaaggaactgcgataagtgtgaggacggctactacaatatcaactcgggcaccggctgcgagccctgcgagtgtaaccttgaggggtcattcaacaacacctgtgaccctaacgacggacaatgttactgcaaaccaggcattgatggcaaacactgcgaccgttgtcgtgcgtaccactacgggttctcagctgagggttgcagagactgcgactgtgacgagtggggctccaccaactaccagtgcgacatgtccgggcagtgctcctgtcaggagaatgtcgaaggacgccgatgtgacaggtgtatggaaaacaagaagcgtcgcgctgacggacagggctgcgaggactgtcctccttgctacaacctcgtgctggatgctgtgaaccaacacaggaaggagttgaaagagcttgatgatattctagcaaagatatccaagtcgccgacagtagttgagaacgctgacttcgacaatgagctgcggcaagtgaggggcgacatcgagcggttggtgcaggatgctcaggctgagttgggcaatgggcccggagccagcctcactgacaacctcgccgaactggctgatagactcgctgacgtcaggaatatgctgttcaaaattgaagacgagagctatgatgggaacgaagcggtggagaagagcaagggtaacgtgtccaaagcagaagacaccatcgaggctgcacagaaggaaatcaatagcgccttggagtacatggatggcgagggagctgcagcattatcgaaggctcgcaacagatcagaccaattcggaaagcaatcagtcgacatgtcagctcttgccaaagaatccagactgctggcagaaaagttggagaatgaagcgaagaacattcgagaaatagctgacaaggcgttcaacacttcgattgcagccaacaagatcgctaaggatggaatcacaaagcaagctaacattagcaacgaagtacaaatcctcacgaatgagctgaatgcagcgtcaggaaaattgaacagtatgacagaattagctgaccaagcactcaagagagccaaggacgtgtacgatgaagctctaggattgtacgccgaggtgaacacgacactgctgcccgatatcaaactcagtaaactgaaggagacagccagggaaatgaacaaaacgatcgatgagaaatcggctgagctagaacgtttggtggccgacaacgagaacacgttggagcagctagataatgccataaaacagggccgcggtctcttagaccagggtcatgataggcaggacgagctcaacgacctcctggcgaaactcgacgagctgcaggaacaggccaggcacgacgtggaactgaccaaccagacactgaaggacgccaatgaaatctacaagactttgaaagaattcagtgaccaagtgacagaatcacgtcagttagctgagcaagcagctctggacgtgcctgcagtgcaagcgaagatagctgcggcagatgacagcatcaatagcatcacggaacaactatatacggccagtgacaaggcgaaggaggcacgagacttggcacagaaggcgcagaaggagtatgctgataaggcatcagatgcagcgtttgaagtcagaaagaaatcctcagcatctagatctgaggcttcgaaactcagatttgaagctgagaaattatccactcgagtacaagaaacagcgactcagatcggcaacttggagaaagaggcagccgagaatatgcagctaacaagagacgctaaaatgaaggttggccaagcaaacactgatgctagggaggcggagaaacaagtaaagaaaggcctcgaggacttgaaggtcatcatggatgagctgcagaacttgcccacgttggatgatcaggcactagaccggctgcaggagagcttagacaaggcagagagcgacctcaaagcggttgatttagatggcaagattaagagcctcactgaagccaagaacaaccatcaaaggtggatgaaacaatacgaggatgagcacagccatcttcggctggaggtagacaatatcaaggagattctaaaccagctgccagacggctgcttcaagaggatcgtcttggaacccactgaaggccccagcagagctgccagcttcagataaacgtgtgacacgacagaacaagccagacacatgtagacaaaacgaggacataggtttggtatctatatctagtaaaaaatcgaaaatatactaacgaatcgaatgggtctatttttcggccctgaactccatctataagcccctacgttcactctgtcgtactgtaagcgtattgtaattgcaatacgctcgtgtgacgagagaaccacgtacaatctattatacttaagaaagtttgtatggatgtatcctaagaagtgaataataataataatatgttccatacgatagctcaatgtcgttgcaatacgcttacgaaacgacaccctaaagattcatttgcgaagtgcctgtattttcattacacaacaacgtgtatttatttcataatataagtattttaatcgatttttactcaggagatttccctttatgcacttagacacacaccaatctaaagaaatgacgctgtataataataaagtccaattttagtaaaaagacaaataataaaacagttaggtagatgactaatttttatttcaatgtccttctggtagattattataaaacattagacatgtattttttatttcttgcggagttcgagtatacgttatactttcttcgatatgttgatttgaaatatcgtatgacgtcacttctaggttcatttcatacgtagtaacggagacgcagttagctcctactcgttacatttgattcattttacacctaagtattgttttcttataagacaaaataaaaaatacgtgtctaatatttattaattatctaactgatggac

SEQ ID NO: 252 - DNA, 6121 bp, Spodoptera frugiperda
  misc_feature (1)..(6121): Gene targeted: TC004745; Universal ID: GS987
ctaccgacttattaattgtgctttacaaaccttaattagttggttatttcatttagagattttcatttccaccagcgtggtattaaattattatagtaccgccgatatcagtaatgatagtgtattcgttgtgatccggtggcattcgtagcagcttcattcaatgcttttattttgccgctcagcttccctcttcctctcaattgtgtgagcaagacaaaaataacatgtgtgtggtcctccggcgagggggctcggccgtttccgccgggcttcgggcgccttcggtcccaagacggcaacttaatggctcgaatcataatggcggctccacaaacatgcagtgtacgcacacgaagttcgaatcagtattgcccgagtcgcgctgccgtcgacacgcaaacgcgctgtaacttttgtaatgaaactcggtctcgttccgtgtttcgtacgttaaagtgattgatagaagtgacgaattactggtgtaaaagtgtgtggttatgtggcggcgagtgatatgacagcgtgcgccgccagacggaccccggccgtcttcatgaggatactggtgacaagcctggccccgagatcatggtggctcccgattccgaggctcctgcgaatcctcggatagcggccgccgcgcacgagagcccctccgcagccgaggcgcgccacagcgccgacctgtacattcgcaccagctgggtggacgcagccttagcactctccgaacttgaaaagggtaacatcgagggtgggcgcacgtcgctgtggatccgagcgtggctccaggaacagctattcatattaggctgttttctgcaaggtgacgcgggcaaagttctatttgtcgcgatactcgtcctctccacgttctgcgtcggtttgaaatctgcgcagatacactcgagagtcgaccaactctgggttcaagagggtggtcggttagaagccgaattaaaatataccgcaaaggcacttggagaagctgactcctcaacacaccagctcatcattcaaactgctaaagatcctgacgtatcgctactgcacgcaggcgcgttgctcgaacacctaaaggtggtccaggcagcaactcgcgtcaaggtgcatatgtacgatatagagtggaggctaaaggacctgtgctatagccccagcataccagacttcgaagcttaccacatagagaagatcatcgacaatatcattccatgcgcgatcattacgccgctcgactgtttctgggagggatccaagttattaggacctgattatcccatttttgtacctggactacaaaacaaattacaatggactcaattacatccacaagaggtcctagaagaagtaaggaaactgaggttccagtttccgttcagcacgatggaagcttacatgaagagggcaggtatcacctccgcctacatgaagaagccgtgcctcgaccccaccgatgcccactgtccagacacggcacccaacaagaagtcaggcaatattccagacgtagcggcggaactgtcccacgggtgttacggtttcgcggcagcatacatgcagtggccggagcagctgatagtaggtggagccaccaggaactccacgtcagccctgaggagtgcgaaagcgttacaaacggtggtgcaactgatgggcgagcgagagatgtacgagtactgggcagacaactacaaggtgcaccatgttggatggacgcaagagaaggccgctgcagttttagactcgtggcagaggaagtttgctgctgaggtgcgaaggatgacagtgacagagtcggtgtcgccgtcgtacagtttctacccattctctacgtcaacacttaacgacatactcggcaaattctccgaactgtcgttaaaaaatattatgttaggatacatgttcatgttaatttatgtagcggtaacactaatgcagtggcgtgacccagtccgctcgcaggccggtgtgggtatagcaggggtgctactgctttcaattactgtcgcagccgggttaggcttttgtgctttattaggcatacctttcaatgcaacaagtacgcagatagtgccgttcctggcgctagggttgggcgtgcaggacatgttccttctcactcacacgtacgtggagcaagcgggagacgtgccgcgcgaggaacggactggcctggtgctcaagaagagtggcctcagcgtgctgctggcctcgctctgcaacgtcatggccttcctagctgcggccttactaccaattcctgccctgcgtagtttttgtttacaagcggccatccttctcctcttcaacgttggctcaatgttactggtgttccccgctatgatctctctggaccttcggcggagatcagcagctagggctgacctattgtgctgcctgactcctgagagccccgtgcccaagcgtccgagaaagatcgctgatcggtccaggagtaagagcggaaagactgaaaagactgcttggaaagataccacgaaacaaccgttggatcccgaggatctaggtgaccaatcgaaagtgacgtgctgcttgagtctgtcgcttaccaagtgggcgaagaaccaatacgcaccatttatcatgcgaccttctattaaggtcacatcaatgctagcgttgattgcagtaatattggcaagtgtatggggagctacgaaagtcaaagacggtctagaccttacagacattgtgccagagaatacggacgaacacgaattcctttaccgacaggaaaaatatttcggcttctacagcatgtacgcagtcactcaaggagacttcgaatatcccaccaatcagaaactactttacgaataccatgatcagttcgttaggatacctaatataataaagaacgacaatggcggcctgacgaaattctggctgagccttttccgcgactggctactggatttacaagcagcttatgacaaagaagtcgagagtggatgcataacacaggagtactggtgtaaaaacgcaagcgacgagggtatattggcgtacaaactgatggtgcagactggacatgtggacaatcccatcgacaaatctctaattacgactgacaccaaaaacggtcatagattggtagataaggacggtataataaatccaaaagcattctataattacctatcagcgtgggctacgaatgatgctctggcgtatggtgcttcacaaggaaacttgaagccacaacccaagagatggacacattcgtcgggagacacagagctcaaaataccgaagtcatcgccccttatctacacgcagctaccgttctacttatcaggtttgactgacacagagagcataaagaacttgataatgtcggtacgggatctgtgtttaaagttcgaagcgaagggattgtccaatttcccgtctggtattcctttcctattttgggagcagtatttgtatttgagaacatcactgctcctggccctcgcttgtgctttagctgctgtttttgtggctgtaatggtactcctcctgaacttctgggcagcagtgctggttacgttggctctagcgacgttggtgctgcagttgttgggcgtaatggcacttctgggattcaaactatctgcggtgccagctgttctactagtccttgctataggcaggggcgtccactttactgtccatttgtgtttggccttcgtaacttcaattggttgcaagcgacgacgagcatctttagctcttgagtcagtgttagctccagtagtacatggcacgatagctgcagctcttgcagcttccatgctggccaccagtgagtttggatttgtggcgagactgttcttaagactactgctagcgttggtactactcggcttgatagacggattgctattcttcccaatcgtactagctattttgggaccgaatgctgaggttcggccactagaataccccgaaagactatcaacaccatcaccgaagagttccccagtgcatcctcgtaaatctagttcgaattctggaggtagcgataagggaagccgaggaggaaagtctgcgccgagaccatcggctccttcactaacgaccattactgaggaaccacccagctggcactcctccgctccctccgtacagtcctccatgcagtccattgtcgttcaacccgaagtggttgtagaaactactacttacaatggcagtgactcagcctcaggacgatcgacgccgacttcgaagactcctcattcgggcgctatcactactaaggtaactgcgacagcaaacataaaagtcgaagtagttacaccgagcgacaggaaatcaagaagatcgtatcactactacgaccgccgtagggaccgcgacgacgacagggagagagatagagacagagaaagagaccgggatcgggatcgagatcgagatagagatagagatcgagagcgagatcgagatagggatagagacaggtcgagagaacgagatcgcagggatcgctttagagacgaacgagaccaccgagcttcacctagagaaaacggccgcgactccggccacgaaagtgactcatcacgacattgaagacacgcgcgtgcccgctgtgtgtcctgtacaaagagccacatcgtgtcaacacgctgtgaagatatatttgcttgaatgcaactaattatatactgtatttaatgatctgatcgatgaatctgacatctttacctgagtttatctcttataagctgagcaatcgtacgtaaaacatgttttaaggttggcaataccgcttataatcagtaccttaagacagtattacgagagttgtatttttaagttaactctttatatggatatagtggaggctatattgtaattcggtacatgatggaagtgctaatatctaacgtccaggttgtgtgcagctattcgtaaatagtgtgcgtgcaggacggtactgaaatcattccatagcacggcactgacgtcactgtactggagcccagtacaggcacgctccagtgttgccagctagtgaattctttactgtataaaaaccaaatatcatttgtagacgtcatatctattacatttgtttgtgtgttcctattttaaagacatttccatttgtctccaaactctttattacgtttatacttctaaagactgtggtcaaatattattaatttataataattattatttatttgtatgtctataattattctgtcaccaggaaaatctgtgggaaatctcagatgaattgtacaaattatttaggtagttgtaactataggctagacggctatttatgagattacttagttatgtgttatacctacactgtattgttgtgatctttaggtaaacttagtaactgtgaagactgcatttaaagatcaaaacacagtattgtgtgaatatagggaggcgaggcgtcggccgcggcccgagcgccgacacccacactgacctcacgttatgatcggcgagttacgttgtaacgatttgtgcaaagtacttagtagcatatattaatttatacgtacctatataacttaatgatattctgtaaatatagtcgtagcagtagcaagtaactgtgctcgtagcaagcgcccccgtgcggcagctgtgtacatctgtatcatttatttttatacaattttaactgacatattgtcgaaaaactgtaggttgtagctgagatgaaaacgtttattaactttgtaggtttttaaaaaattaacaaattaaattcggggacatattattattttgacagtgttcattaattatcatgtagcatttatttacactgacaatttagcttgcgtttgcaatgttttaaaattccaagttcttgagtcatatttttatatcaaattaaaaaaaagtgtgaaatgtacggtcaaccgcacattactggtaacattttggtaccaaaagtgccttattgtaactgtacgaataaagtctaataaatatctaccaacgatgtgtgtttgactgtacatgaaatagaaaagtacaatttttgtattaggaatcgtcctaaaataattaatttacaataaataaaacatgagaattgtttaaaatattttttcttcattttgcc

SEQ ID NO: 253 - DNA, 1774 bp, Spodoptera frugiperda
  misc_feature (1)..(1774): Gene targeted: ara; Universal ID: GS873
gacatggggtgtgcaaacgaagatgcccaagatgacttctttaatcaacaagacttgctcgtgggcagcagcggggcgggcaccggcggcgcggctacctcgccggacgggggttcgagttcggcgccaccactgtcgccgggtggctcggccgttgctggcggcgcactgtcgccaggcgccggtagtcatgccagcaccccagccgcgtcctgctgcgacacaccgcgccccatcatcacagacccggtctctggacagacagtctgctcctgccaatacgacggagcaagactcgcccttacttcctacccccgcctatcaagtgccgcggtcggtgtttatggaacaccatatccatcgactgatcaaaatccttatcccagcattggtgtcgacagctcagcattctactcaccgctgagtaacccttacgcgctcaaggagggcggcggcgagatgtctgcgtggacgtcggctggccttcaaccttcaggcggctactacccctacgaccccacgctcgcagcctacggatatggagccgggtacgatttagctgcgagacggaaaaacgcgacacgagagtcaacggcgacactcaaagcgtggctgaacgagcacaagaagaacccatacccaacgaagggcgagaagataatgttggcgatcatcaccaagatgacactgacgcaggtgtcgacgtggttcgccaatgcgcgtcgccggctcaagaaggaaaacaagatgacgtgggagccgagaaacagggtcgatgatgatgacaataataatgacgatgatgaccataaaagcaacgatggaaaagatggactagatggaaaagactcaggaaccggctctagtgaagacggagatagacctcagcaaagattagatatgcttgggcaaaggacagaatcagaatggtccgaatcacgcgctgatagtggtcccgaatcacctgaaccttacgaaagacctattcacccagcctatcagcatttaccttcccgtgcgccacccggcagcactccagcctcagcaaagcccagaatatggtcactagcggatatggcaagcaaagagggtgaagcaccagcaccaccatcaccagcatccgcgttctaccagtcagcagccgctgcggcggcagctcgccttgctcacccctacagccgacctgagttatatcgaggcctgtatcctccgacccacccggcggacgtggccctcctcgagtactctcgttcgctggcgcttgctgcacctgcccccgcacctccagctccctcaccgtcctcatcgtccacgtcgtcgctggccgagccccctcccccacctcgggcctgaccacaagccccacgcccgccgttggcgcatcgacaataatttcgatctcccctgaaagtgccgcgagagggcactcagcctgtaaatagcgatagactaatataaatatgtatacatacgtataaatacgtgataataattattatgcaccggtagagaagcttagatttgtgatagtggacacatgcgagcggtgcgccacctgccgccgcccgcgccgtgaggttgacaactcgcaaacgacgtcgacgcagcgcccgcgccgaccgaccgacaatactaggtgctatacaagttggaccttgcgacatgttgctgtagttattattggaggtggttaacgaagtgatttcattcaaaataggtattaatatgtgttaagtttcttatacatagataaacaacactgttttagattatt

SEQ ID NO: 254 - DNA, 5531 bp, Spodoptera frugiperda
  misc_feature (1)..(5531): Gene targeted: Mef2; Universal ID: GS885
catcgccgcgccttcgtatgagccgtgtgtcgctgccggtctccccccgcgccccgcgacgaaccgtctcacccgcattctagttgtgggtgtcgcgccgtgcagtcctcgcgtgtgccgctcaacttagtgcgccgtttgtgagtgctttaaatcccgcacgagtgtcagtgtgacggaggaccctgtgccaccccgcggaggatgttaacagcgcacggtagcagctgttgacgttcgtagaagcagccagccaaaggcaactctttttctcgccccccgctccccgcatccccttccaagattgctgccaccatgggtcggaagaaaatacaaatatcccggattacggacgaacggaatcggcaggtcactttcaacaagcgtaaattcggtgtgatgaagaaagcctatgagcttagcgtactatgtgactgcgagatcgctcttatcatcttcagctccaacaacaaactctatcaatacgccagcactgatatggacaaggttctcttgaaatacacggaatacaacgaaccccacgagtcactgacaaaccgcaacatcatcgaggcactaacgaagaaagagcataagaacggagtgatgtcaccggacagcccggaggcggagcccgaatacaacctgacaccgaggaccgaggccaagtactcaaagattgacgaggaattccaaatgatgatgcaaaggaaccagttgaacgggagccgagttggagtgggagtagctggtagcaactacaacctgccagtcagcgtcccagttggcaactacgatcagacactacttcaagctagtccacaaatgcacacttctatcagtccacggccatcgtcttcggaaaccgattcagtatacccaagcggcggaatgctagagatgtcaaacggctacccaggttcaggatctccactagatgcaggttgcacgccgtcgccctcgccgggcccggcgccgtctccccaccggcacggacacaagtctcacggacatgcaccgccgccgcaccactcgccgcggcacaacaacttgcgcgtcgtcatacccagctcaatgccaccaccacaggatgacatatcttacgctggagagacaccactcggctactcaggactcggcaatttcggaccacaggatttcagcatcaactcggacatgggcatcggactgacgtggggcgcacaccagctccagacgctacagcacaacaggtacattagcagcctgccagtattgggcgggggtggcacgcctccaccagcggcgtcgcctagcaacgtgaagatcaaagcagagccagtgtcgccacctcgtgcgcctgaccatctccaccgcgcgccgccaccgcaaccagctccgcagcccgcgcatctctccggcgtcattgatggttcagtatcttcgagcaacatgggctcgccggccgggcaagacatgcggcactcggccgtgccgctggactatgagcagccgcacacgaagcggccgcggatcgagggctgggccacatagctaggctacgaggccttcggctcgtacccgaggcccctgcacccgcactgctagacccgcgaggcccgcactctcgcggccctctatcgagcttgtgaccgtcctccggcatgctccccccggactgaacagttccccgcggcacagtgctaatcttatcactaaaaaagtctgataagcaaaaggtgcatccaaatcaaacggtgcttacatttttgatggcacggtcgactaactctcgagaagctgccccactcccgggcgtagtacgttacatattcgtatataattgaatgttcaactttacactaccctctattaatacgtaattaattattgtaatgcacacaagtacactaaagattaagattaaatgttaaaattaagtacaatagcaacccttctgaacaattttgaactttaagtacatatagatagatattgaattcccctgtaaatagacgacattatatgtgcaatccgtgccattgtctgtttagcttaaagttagtcaatttaaagattagtgagtaaaatgtactagtgcagtataagttgaaggcgagttgaagcggctggacggcgcgcggttgtgtagtgctatggacacggaccacaaactgtgtgaagtgggacttgtaatcaaacgactgttgacattttgtgttagtgttttaaaagttttttgtgccattttaaaaattataataatagtgtgacatccgaacttgaatctgtaaatttagtagtcctagtgtcatcacagaagataataaattatatgtattgtaaaatctactttatctattgacatatttatacatgagaatcataatgatatttacatgatatgtatacacgtcccgttaggaacgaatgttatgtaagtaagtaggtaatattagctagagttgagtatataaaggtaccacacgaagctttaaaatttcttatgataacacttgcactctaagcagattttgtatgtaaacacagtttatatcgtaaacatttagaactcttgacgtttcgaaactgacaattcagttcgacagattaaaaaataatataaattgttaataaaagatcactcgttttttgagttttgcttgaagctaaaccaaatagcattacaactagtgtatgcgataaattaaatgttacaaatttaattttcttctaaagtaaatctgtctacgcttcgatatttatcttgtactaccaatcccattcatatgtatcatcaatatgtatgtatgtatgcatggtcttatattgttgcagaccaaaatatatcgagtcaattttgtatatcaaaatgtaatttacttgttaggtatatgtaaggtttattcagtaactgtactgggttacgaataaaaatatatggaacaactttgttaaatagtactttttattttgttagtgtgatctgaagtaagtttttttttatttttatttctacttaaataatgtaaactagagctatgtaacgatgaacaatatacctacaagtcagctttaagcacagacaaaattatattttacattataatatttacactaaaatatgcactatatcacaatccgccctatttttagatgttattgtctgaaagaaactgtacattgtatcgtccatagttcataatatccctcatctccccgctttccttagtcatcgctttctccccatcctgtagcaccaaagtccccattctctcaagtcctgtccccctctttccccttcccatatcgtctcactgtagttgccttactcacagtgcctaaatgtaccatttttataccaaaatttgtatgttatagcatttttgctttaatattcacatcctggtaatcttaagtcatttgatgatgttaattgttctgcccgtagtacgcttcctgttaagatacagtcggagacagaagtaaaaagagtatccaataataatattctaggtgtacgttgatgtcatggttaatattaataaatgtttcccgctttttagagtttgtgacaactgaccccgcggttttcactctttttattttttctctcgactgtacgctcgtactagagtcagaacgatgcctataatatatttctgtatcacattttgtcagtgaaactgtataaatgtgtctataattataatatataatgtgtaattaagagtaacgaacaagttcacatcatagaatatatcactagagtaaaccttcaaatcacagtaacaaaatgtaaacgtacacttgttaaatttgtacagggagttttccatgtttgaggttcaaaagtctgaacgcatatgaatattaaaaaaaaatgaataaaaaaataaaatgtattttcgcattgtaacataagtacacggttaggtttaacgaattaatattttattaccggatcataatggatgttgacctgtttatagggaactatttaaagatcatgtaagtacatcttgaatgttaggctaaattgttaatgtgatatgatatcctacgctgttactgggcccgatcattgttgaaccttatatcgtcgtcactgttatgtattggacgtgtttacagtcacaattttcttgttgtccgtgacgatctttgtaaattcccccctccctccccgggcctcgtagtttgagattctacattgcgttatcttctatttcggtcgttcgttcctaaaagttcctttctctggtaacgtcgatgtgtttcgtattaaaacttgctcaatattttcggcgatgatgcgaaatccttttgttcttgttagaattcatttgtacttgtccgttgtagaaagtggtattatattgataagtgttgcattgtacgatatcaggcaagttactacctatatacctatcacagtacagacgcactggtataaggtcatagccaaattaatgaacgcaatttgcacaaaacacacattggtattggatgaaattgttaacaataggtgacatttcctttcgtagagcgatcaagtgacgaacacgtactttatcgcttgcaccgtgtattgtatcaatgtattgtataatattacgacagtaagctggtgttgggagcattatttccgaggttgtgagctttgctatcgggaatgagtttcaactttaattaattaataaatataaagtatataaatataattattcatttcgacgcacaactgtgttgtgtgttattgtaaaaagcgtttgtttgttctttatatatgtacctactttcttaatatatgtgttaacctgtatatcgctgtgagacaatagcaaggggcttgttcagttaatttataatctagttgattgcatttaaagatacgtagtcataagtatgggataacaaaaaatgttttgctgaacttattcacagtagatgtcgatgtatttactttcccctgtttttgctattgcaccacagtatatcgtgaacaatccaaatagaatataggaatataaatacatatccttattgaatactcagaacgatttcacattaatttcttgtaacaacagttgtgcaatacatatataacaaactgcttaggtaggtattaggtatattttcgtttgaattttacaaagaatgcaaaatctgttgtattttatcgatatttttactgataatatgacgaggacgccgacggctttccggaggtgcgtctcgggaatattaagtcataattgtgtaattattttttaaggttaggccgggccaaatattgcattaatgtaggttgctcggcgccgtgtctttgtgtcgaggcagtcctgtctgccctatgtattataattgtatgatgaatgaacatctcagtggctgaatgaaatattaatgtttatcgacagtgttagaaaattgttataaattattttgatgactgttcgaaggataataaagagttggatgtcaatgtttgttgtttattttgtaattaaacctggccttagaattaattgtatttcaatatatctgag

SEQ ID NO: 255 - DNA, 2744 bp, Spodoptera frugiperda
  misc_feature (1)..(2744): Gene targeted: FA elongase; Universal ID: GS883
cgagctcacctgtacgccgtgcgcaggcgccgtttttgcgcgccgcgatacgaacgcgatacttcacgctcacacgcaaccccgcgcccccacccatacactagttaatctgaccaggacatcagctgtccgactctaacatatagtgaatgtgcacttgtacgactcggcctggaggacttactgccgaaataggacctcgccggtctgacagatcgatcactcagataagctaagcgaacggaagacaaaattgcctcggaaaattgtacctagtttaagaaatcgacacaatggcgctagggataatgctacaagctataagcgattttcaatattatatggacaaatatggagatcctaggacaaatccatggttcctgatgagttccccatttcctacattattaatatgtctaagctatgtctatctagtcaaggttttaggaccacgatttatggagaatagaaaaccctatgaactaaaaaatgttctaatattatataacttcttacaagtaatattcagtgcgtggcttttttatgagatcggagctgctggctggttcacaggcaggtataactttcaatgtcagccggtcgaccactccaaacatccacaaacaatgaggatggttcacgcatgttggtggtactacttttccaagttcactgaattctttgatacgatcttctttgtactgagaaagaagtttgaccatgtatcaacactacacgtgatccaccacggcgtgatgccgatgtcagtgtggttcggcgtcaagttcacgcctggcggtcattccacattcttcggcttgctcaacaccttcgtacacattattatgtacagctactacatgctggctgctatgggaccccacatgaggaaatacctgtggtggaagaagtacctcactactttacaaatggttcaattcgtcggcattatggtgcatgcattccagctgttgttcatcgaatgcgactaccctcgcgctttcgtctggtggatcggcatgcacgccgtcatgttcttcttccttttcaaagacttctacaaccagtcctactccaaacctaaggttcgcgcccgatcacctcaaccagagacgacagaaataaaagacataacatacaagaacggttcgctgaagaacggcttcaccaacgggcacacgaacggcacgttcgcgcggtctcgtaccgtgctgccggccggcaactgacggcggacaaggcgcccaccttagcattccgtagtactctgtgattcatagcctgaaattattacgggacgttaatatttcttatttaatgcgtggaccttcggggtaaaggtgtcggatgtatagagggatgcgcgagcgcaggtccggcctctcgccacgtcgcctcgtcaataataaccctagaagtagtggtacatgtgatttgtctagtgtacatacagttaggcggtatcaatggtgtaaattttattttattgatgtaaatgtatagctagatttgtgatcgcatagcgttttatacttttattattagagttagagtttagagacctctaaaagaatacagtcataatacttacagacacatgtagtttatacatggtgcttaaatgagataatattatttatgattatgagcttgtaaacattaaaactaacattttcactagattataatgattataaacaatgttattatagtttatacttaattgtttacctcgcatcaatggtaacgctctgcgaaagtcgctcttattgctcacagaataaaagatgccagtgtactttacctttgatgtgtggttaattcgaaaacatgaccatattttatcaaatgttattagatgaatatgaaattgtagttaattgtaattatattatgttacatctaaaatctttacctaattgggtcacttcaaaaatatacaataataacaatgtgaaacgcaataatgtatagtatgatagagttccacacattttatagaatacttaaataaatgcttaaagttaatggcagcgaaaatgttcaatggaatagtcttaaataggaaataatagctttgattgtagtgctaaaatgttaataagaatcagtgtttagttttaagtattgatcagtatttttacaagctcatgattatcaaggcttattcacgattagatcagaatggatttttataccttttggcggaagccaccaaattgaatatacatgatgatttatcaacgccgtttgcctttttgtgtatttataacacaggtgttaatatttcgatgacaactttttattgttgtttattttgacgtgattattagttttttttttttctattttaagtacaacaaactgtattttaatttcgaccgaatgttcaatttaggtttagattactatgacactaaagtggttgtgttggttatttattttgtttaatttatcttttatttataccaaaattatgtatattagatcaaatcgataacgggttttatagcagtagctttcaaacttccttttagtcttccgttttgttttgtacttaccaaaattaaaggtgctttttgtactccgaatattctgcttttgttagcagccatgcagctgaagctcaccattttgtaaatataaattttgtttcatttatcatatagaaatcaatttatgtacctattgtaatttttatacaaaaatatgcaattaaactataagtgtaatattaaaaaaac

SEQ ID NO: 256 - DNA, 6040 bp, Spodoptera frugiperda
  misc_feature (1)..(6040): Gene targeted: Uncharacterized protein; Universal ID: GS875
caacgatattctgcgcacgccattttgtaattttgagcatgttgattcgactctcaaaatgaatttcatttcaataataagttttattggtgatgtagtgtaattaatgtaatagtgaaagaagcaaataagccaaaatggaaatgccggaagttaaatcgttcaacgcggagttatccgcgttgtacgacaacaagccgcctatatcaaaggcgaagatgagtgctatcacaagaggtgctataaaggccataaagttctataaacatgtagtgcacagtgttgaaaagttcattcagaaatgcaaaccagagtataaagtgcctgggctttacgtgatagattcaatagtgagacagtcccggcatcagttcgggcaggataaggatgtgttcgcgccgcggtttgctaagaacatgcaacaaaccttcgcaaacctcttcagatgtcctcctgaggataagcgcaatatcatcagagtacttaatttatggcaaaagaacaatgtgttcagtccacaagttatacaacctcttcttgatatggctgaccctaatcatccattgcaccaagagatacaacaacagcaaaacaacactgccaatgggagcagtctgaacataagtcacaatgcaacggataacaaaatatctcctgtgccacaaccactccatactccacagtcttccacacctatgggagatcagttccaggaccaaccttcaggccagccggcgaagttcaacaggaagctgttgaacgacttcgagtacgagagcgaggacgacgcggcgccggagcccgcgccgcagcactcctcgcactccacgcacacctcgcactccacgcacgccacgcattctaccactcatgcgcaacaaaaccccgctgatgcgttgggcagtatcttaacaaatcctgaaatcatgaggcagctgcagagtttgcaagctcaaatgcagatgatgaccggaatgcagatacctaatctgatgcctatgatgtctgatcttcaaatgcaacaatctcaaaatcaaggcctgccatttatgggctcacagtcagattcccagaagcagaatgacccgaaggatgatatggtagagtctgacattgagtttgtagagaccggaccacaagtcattgaaattcctgacgctaatgattctagtccatcaccgaaatctcggcgacatcgttcgagatcgaagtcaccgcggcgtcgtcgcaggtcatcgcggtcgaggtcaaggtcgcccaggagacggagggacagagaccgcgatagagaaagagataaagacagagatagagataaggaaaagaactacaaggagcgtgaagcagaaagagaaaaacaaagagagcgagagaagaaaggacttccaccaatcaagaaagaaaatcttagtgtatgcagcaccacactatgggtaggccatctatcaaaactggcgacgcctgaggaactatcagacctcttcggtgctatcggcggagtggccgccatcgacgtcgtggctccacgaggatgtgccttcgtcgtcatggagagacgacgggatgctgctaaagctatcgccaagcttaacaggcataaactgcattctaaggagattacggtggcgtgggccccgggcaagggcgtgaagggtcgcgagtggaaggactactgggaggcggagctgggcgtgtcgtacctgccgtggggcgcgctgcaggcccgctgggcgctgggcgcgctctcgctcgacgcgctcgaggacggcggcgccgtcgacgaggacacgctgccgccatggctgccgcccaggatcctcccgaagacaatgatggacaacatgtcgatgctgggcatgccgggcgcggcgccgggcctggccctgggcacgctgggcacactgccgggcagcctgccgccggtgtccatgccccccgtcagtatgcctcccacactcagcctgccccccaacctacctccgggggctaatccggctattagtatacctaggatgcctcctccaggaatgacagcaggaatgccaccaggtctagccccaggtatccctccaggtatccgaccacccacactacccaacatgcccagtggagtacctgcggcagggtatgttgtagggctgcagaacgaggcgggcctggcgcccggggctccgctgctacgcttcccgcctggagtgccgccgcagtcactcgcacagaccggtatggtgggcgggttcctgagcagtttgctgggtgtgggcggactactgcctggcgtgcccttgttgcaccccgcgctacatgatactagcactgcgccgcccaaccgcggctcggcggcgggcagcgacgacgccatggacctggaccccgaggagcccgcgcccgacgaccacgacaccaccgacacctccgcgccaccgcccgcgctactgcccgaccagattcaagccctgctatcaaaacctccgccaaacttcaactcagcagagcctcctccaggcttcaatatgtcggagccacctccattcaacgtctctcagccacctcctgacgacaagatggatgatgacaggaaagacagagacagggatagaaggggcggcgacagagatagagacaggaggggggaaagggatcgggatcggagagaaagaggcgatcgaggggaaaggggtggcgatcgaagagatcgaggtgatcgggatcgaggacgggagagagatcgtgacggccgtgatgatcgtcgggatcgcgatagagaccgaggtcgggagaggagagacagagacagagatagagatcgcgaaaggggagacagattctcttctagagataataatagagatcgtacgggcagtcgagagaagtcacctagagcgccgacaaacaacgataatcccgaaaagagtctgcaagagagactgtgggagatggccaacgggaagccgacgagagacgacaagcgggacgacttccccgaccagagggacgacgctaccgaccagaggaacgaccgcccgccactcattgacaggctgcctgccaggcatgacggacccccgccgcccatggataccgcggaggcggagtgggcgccgggcgcaggccgactgccgcacgtcgccgcgcactaccgcgccgaattgagaatgagaggaccgcctaggcccccgatggcaggtccctggatggacggccccggcccgggccccttcggcccccgcttcaacggcatgggtccccccttcaaccggccaccattcgacgggccgcggcctcccttcgacggcgggccgcccatgttcgaaggcggcccacggttcgagaggcctccgttcggtcggatgccgttcgatggaatgaaccgaccgcctttcgacggaccacggccaccgtttgacgggccgcgcccaccattcgacgggccgcgcccgcctttcgacggagctcggccgttcgatcctcccttcgaaggtgaccgaccacccttcgacggcccgccgcggttcgacggacccccggagttcttcgaccgtccccgaggacgcttcgatgatcgcgatcagtacggcgaccgaggctggagcggagacagagaccgcgatagagactggggcgaccgacgccccgactgggacgacaggcgcagggataggagacctagggaccacgaggacagatataacagaccagaccgaggagacaggaggagaaactttgacgaccaaggtagacctaacgaccaacgacgcggtgacgacaaccagaacagaagtaacgactcacgtcgtgctgacgaaagtcaactaaacaagcctgctgatgcacgccgcggagacgacagacgtgaaggtagccagagtaaatcgaggccaccgcgggatgaacgaagtgataaaaacgataggaatagttctagacgagacagggacaggaagtctagatggggcgcggctgaggaagctgaaactacgggcaacggggagagcgagaagccgcaggaggctgagacagccgttacacaggctgccggcgacgtcgccgccagtgccgagcccagcgaggccaccgacactactagtcaagatgaacaaactgtacaaactgaggtcagcgacagcattccttcacacgaaactgaatctgagaaaggcttccagcctcctgaagacagcatggatagtaatgaaactcccggcctaacggagcgctccgtggagcccagtcctggcgggctcgacgacaagatggagcgctcgccaccggagccctcgcctgtagaacactcgctcccagagccttcgccgcaagagcactcgctccccgagccttcgcccccctcgcactcgctcccccctccctcgcccccttcagactctatgcccgagcgctcgcccccagagtgtagtgtaccggagcggtcccccccagaaccgtcacctccgccggcggaagagcgagcacaggagcagtgcgcgaatactttgtacgacgcggatgaaactgtcgacaccaacttctcagctcccgccgccactgagtacgaacgagagcgagatccgtcgccgcctcctgtagctgaaaaagattttgaagaatctagcatggatacgtcgaaacctgtcgatatgtttagtcctgaattggaacagagtgagagttcgcaggaggccgacgtatcggagccacagagtgagagtaaggaaggagccgcttgacagcggcgccgatggaagctgaacgtgggatatttccagtggaaatgattcgggtgacgccgcgggccccgagcgaccgccgctacctgccgcagcgtagctatcgctctgccgaccgccgaaaccgttataacgccaaagatattttttttatactcgaaacaaaaagttgaaatatacgagtgccttattggttaccaaaagtggtgttttgttttgatcgacggcacgcgaggcgtagaagaggaacgcgcctgggcactcaagtcgagtgacccgggccaggtacggttgctaatgatacacattgtacgcgcgtctagaacaattgcacgctattgcacacactactgcgacgttgcaacatgtccgcgacttgtcctttataatactctctggacgatttcacttccatcttaatcgttgtattcaattaaatgaccagacactacatgttgcaacagtaataacttgagagacatgcacaattgtactcggcgggcgtcattattttattattgcataatgtcgaaatgggatcgaaagttatagtacattaatctagtgtaaagtaatgaagtagtccaatcgttttaatttatctaatacatatgattaccatttcgacatattatatcgctagcaatgtgtgcaaaatacctgtgcggcggccgcgtcacccgaatcagccacggatatactggaagcgtagcggctacaagaacggaagatacggcgactgtctgaactatggactcatgtgtttagatattgtgttacgtcgacctgacgactgtttgttaagttcttttttatttttacgttactaacttcgattactcgaattgtatgtgtatacttatttttttattagcaaggtacgttgctatctaatattactcaacatttccaccaaacttgttagtactatttcgcacctttaaacaattctatttgtcttaggtaatttggtggcggtagggaacggattttaaagtaacgactatttaaatctattttatagatataaacataaatgttttataaatttatataggcactatatctgtagttaaattgtttatggatttaggtttactgtaggctggcaataagtatattttactttgaggaatacagcgcaataagtgctatgttacgcttcgtagcatcgatgtttatatgtaacatatttttataaaattataatgtgagtcttattatatcattgagatttacctactccattcattttaaactcttcaatgttaggtaatgttttagctgtgtagataaacattatattttcaatgcat

SEQ ID NO: 257 - DNA, 3160 bp, Spodoptera frugiperda
  misc_feature (1)..(3160): Gene targeted: Translocase of inner mitochondrial membrane 23; Universal ID: GS880
tgacatttcaataaagttcgatttcttcaaaaattcgctgcgtgatatccgaatcacgtttaggtttagtttagttaaaatagtgtaaaaaaaatatcgaaatgtctttattcggcgatatattatcaataaataagaatgaggagaaaacacagcaggcggggtcgagtttgtctccctatttgaacttcgatccccatatcataccgaaaatgcagccggaattcttgtatcctgatgacagtcacatggcatctactgcccgaaggtctaacgtagcactacctatcattggaatgtctttcatgacgggctcaggtttaggtggaatggcaggtttatacagaggtctgagggcaacaacactggcaggacaaacgggcaaagtgcgacgaacgcaagtcatcaactacatcatgaaacaaggcacaaacacaggctgcactctcggcatcatagcgtctttctactcgtgtatcgcgctcggcgtcacatggatccgtgacaaggaggacacggcgaatactttcatcgcggccgccaccaccggcgtcctatacaagagcaccgcaggcctgcgctccatgggcctcggcgccgccgtcggcctcaccctcgcaggagtctacacactcatcaccgacaatgacaacatatggagtaaagcccgatacaaccgattgtgattcaacccgcctagttttgtaaatatttaatagactgttatttttagttttgttatggtcaacgccaaaggatctgccgggacgcagggacttatttgtaccatgttccacgtacctgtttagatttatgtatagtgctttttggtatccataaactgtgcagacaagttgtgtagctcttgccatagatgcaatgtacttaataaatattcttcctatttttaaatggtatatttattgagtaatgtagttagagattatagaaatatttagcctttagactgccaatcatggggcttcctacgccaaaactaaagtgggtataaattattttggaagtcaataggtaataaaattgctcaagtgtcctgatgttaatggcttatgcaaagattggagtgtttccctttccatcttttgcgcctcctggactaagaatacttgtaatgtaccgtattcaaagttgctcttgaagctataaataaatgatttatcttgcatatttactcacaccaaccttgaacacaattatcactatttgtgtgcagtttatggatagctcaccctgtattgcgtacatattcccgccttgtcgtatcaggaccgcacatatatgcataagcgttaataaatgagttatatttgaaaaataacatgtttatttcattttacatggtgcagtttgtacaatgtttgtatttacatgtggcgaatacgatgggatatgttatatactagtggagtcggcgataagtaacaatacatacatacaaacatacataatgcttaggcggatattatacaataccccacccatagtccagtcgagccaatggaagtcataataagagtagaaaatctaacatagtgcaaaaagaacagagtaacagacgatttgtgacatcaaataaggtcttcagttactaatgaaaaatgacaaattgttacataatacaaccttttacctgacccactatgataaaattaatttcggggtgtaatggaattgatcatggaatacgaaatttctttctgcgataacaattattttctcgttcaaaacctcttgacactggatattgccgtcagactcgagtataccgaccaaacaagccacacccgcataaaatgctcttacaagttatcgtttatcaaagacaagtgggtcagatagtccagtagaatccagttaagatcgcctccacgagtaactgacgtcgcgttagctcgacctgaccttgacataataatccctaggggtgtgtctatattggcgaacgcggaaaccctccacgagttgcataaagtaaattggacgcggttatgcaagtgttctaaccgacaaattactttaaattaattatgcgagtaagctaagtttttgatacttacaattagaaatctgctggttttattacagaagaccatttttaagacccaacattgcataggtaactacatccaattaactttaacaaaattatatccatatttttcgccaatatttccacaacatcccataaacatacatcttcaaaatgattgagcaaacaggcccttcttacagtacaatctaatataaaaaactacttacaaaaataaaagttacaatgccatcattacaatccgacagaaagaatacaatttggcaccgaattatttacaaatattcgcgtaaaattaaattgcagttgaattgtattagcgtggctaactagcgttgagaattacgtaaaacacggacatagctctctgggttttacacattcgtttataaatattgccttcaaaccttgactttcggagtaaacgaaagttatcggtttattgacgtttggtattattttgggaaagcgcgggtcgctgtaggagttgcgtgggggatattattgagatgttccaattagaaaataggccaggaaacactcaaaggaaactgcagtcgtccccgagtagggaccggaaatgacctgccaagctgccaatttgctgtccaatgtggacgcgtttaacgtaaaattttgtcttattctaatttacagcaggagatttaaaattggagttttgacaacgaattgaagacaatcgagagatgtcggagtagatatctaaccgattctaatcgattcttgaatttgataacgttgaattgaattttcacaacttatcgttattactttatctcgattttctccaatcgtgacaaaaaacacccaacaatcgatttaaccctataatttacttaagtttagtaacaggcgccgttttaatatcatactttattacagtaaccagggttgtgataaaaatatcttagaaaaaacctttaagcgataacaatgtacatcatttatcattagttatacagtatactcttcccttatctacgtttaacagcaacattaatttatttaccggttttagtagaaataaagtacaaatggatggattttctgcgaagatgatttacataa

SEQ ID NO: 258 - DNA, 1918 bp, Spodoptera frugiperda
  misc_feature (1)..(1918): Gene targeted: Pax2; Universal ID: GS879
gcactgagctgtcttcaaagtaacacggattagacacacgcagtttcctttacgtaattatgtctgcgttcttgctgtgatagtgaaagactgaaatagtgatcttctgggacttttgcatgtgttcggactaatttggtgtttagagctactcgtctttttcacttagctcataatttattggcgtccatggctgtatcaacactgaatatgacaccgtacttcaccggatattcttttcaaggtcagggtcgtatgaaccagttgggtggcgtgttcatcaatggtcgtccgctgccgaaccacatccgcctaaagatcgtggagatggcggcggcgggagtgcggccctgcgtcatctcgcgccagctccgcgtctcgcacggctgcgtctccaagatactcaacagataccaggaaacgggctccattcgtcccggtgtcattggtgggtccaagccaagagttgcaactcctgaagttgagaacaggatagaagagctgaagagacaaaacccaggtatattttcctgggaaattagagataaactaattaaagaaggcatttgtgataaaaacacagcgccatctgtgagttccatttcgagactaatacgaggaggcaaaagggatgaatcagatcctagaagaaatcacagcattgatggtattctaggtccatcatcttgtgaagactcagataccgagtcggagccaggaatcacgttgaagaggaaacagcgaagatctaggactaccttctcaggagaccagctggaggctttggagcgcgctttcaccaggactcagtaccctgatgtatacaccagggaagaactcgcacagaaaaccaagttaactgaagctagagttcaggtatggttttctaaccgaagagctcgacttcgaaaacaattgaactcgcaacaactgagcgccttcaacaccatgtctctgcagtcagcgttcccatcagtgcaccaacaatacgagcctccttctactttcaacgctcaatgtgcttcttggcaacaatcgtattcatccgcattgggtactagctccgtcctgaactccgctctagctccttcccttcatcaatcagcattaactgctccttctgtatgccagtcagcgcttgcagcgtccagtctccatccaccaacttcaagttcattctcctctggtaacctaacacccctttcccattcttctgaacttgctactcccttgcaagcacctactgagccaacccctccgagctcgagtccaaccacgacgagtccttctgcaaaccaaagcagtgcactcacttaccaacactcaacatatgcgaacccaagtgaacctgtatctcacccgtatggttacggagactactcgaagcaagagcacgccatgtcagcacacaatcactggaccactaggcaactcagcggacacccgcaaaacaaactcgcagaagtcagcgcctggcctgaaaactatagttcattcttcggcaccaacgcgtctcactacgcttcgcacgcgcactcgcccactgaggccaagtctgggtatccttacttaggacaacttggtggtatggacatgggcagagtacactagacaaatgccttacgaaacagtagtttctattaaattatatttagattcacaatacatggtccagatcatatcggaatgtgccttcataataccgaatctaataaaatttctttattaaagaatatttatatttacaacgacgcaataaagatgtatattgtatccgatagatattttcagagccttcattagacttttctgtatcatagagatgtattatataatacgtagtttcatagcatgttttatattataatgttttatggttcctcatctagaaagcgcactaaataaaatgtttcccgta

SEQ ID NO: 259 - DNA, 776 bp, Spodoptera frugiperda
  misc_feature (1)..(776): Gene targeted: Vrp1; Universal ID: GS871
tgagcaacgtcggggcactctcagcggcattatcagaagctttagcaggacgagatagagaacctagagaagttcacagagaggtcccaagagagccccctgcgagacccgctgttcggagacaaccgagcgacataaggacgagaggacccccgcctcaaccgcctatacaaaaaccggctatgccattgagttcatcagactccgtgctaacaacgaactcggtgctggaccgcatcagcagtctccaacagcagaactccgaacaagtgatcacttctcatgtcgcctccacgctgcacaggaacaagagctcgctgcatgcgaccggacagggagcgctgggtggtagcatgacctccctgtcatcgtcatcatcgccgacgcccgcgccagcgtcctcgctctcgacgtcagacctctgcgacaggcctcgagtcagccacgggaagcccaacctagcccccaagcccccacagttagccccggctcctaacatcgacactaggccttcgcccccgcccaagaaactaatcactaacggcaaagttgctggacgaactcagagtatgagggtacctaggtctccaccggcgtcgccgtcgtctccacagacggcaggtggccggccgttcaacctgccaccagctccgataaatccacccattggtaccaagaacccggcgtcacatttcggtacactacgagcgccccgcggcctgcgcccgccgggcgtgtgtcccccgccgccgcccgggcgctccgcccccaccgcc

SEQ ID NO: 260 - DNA, 2769 bp, Spodoptera frugiperda
  misc_feature (1)..(2769): Gene targeted: dre4-CG1828; Universal ID: GS882
cctctaccgacgcccgccagtggtggttgctgtcaaacgatgtaatgtcgtggagttgtgaataaattccgattgttgcggcgtaattacgtaggatattttctttagttaagttttattttaattttccaatatgtcgaacgcatcgcttgataaagaaacattttatcggcgcatgaagaagctgtacgcagcatggaaggctgctgcagctgattcaaagagcgatgatgccctggcgaaagtcgattgcctggtgtcctgcgtcggcgtggacgaagacacgctttacagcaagtcaacagctctacagacatggctgtttggttacgagctccccgacaccatcacagttctcacagaaaacagcatgtgttttcttgcaagcaaaaagaagattgaatttttaagacaaattgaaaatgggaaggaagaaactgaactgccacccgtgaaattacttgttagagatagaaatgacaaagataaagaaaacttcaacaaattagtacaagagattaaaaaatcaaaatcaggcaaaaccctcggggtcttcgccaaagacaattatcctggtgaattctgcgaaagttggaaagctgtaatgaaaggtgaaaagttcgaaaatgtagatgtaagttcagctatcgcccacctcatggcgccgaaggaagattccgaaattataaccgtgaagaaagcgtgtttggtcacagtcgacgtctttacaaagtatttgaaagatcaaattatggaaattattgattctgataagaaagtaaaacactcaaaactcgcagagggcgtagaagcggcgatcacagacaagaaatacgtcacaggggtagacacaagccaggtggatatgtgctaccctccaatcatacagtctggaggaaattacagtctcaaattcagtgccgtgtcagacaagaaccacttacatttcggagctattgtctgttctctgggcgctcgatataaatcatactgttcaaacatagttcgtacgctactcgtcaatcccacagatgaaatacagagcaattacaatttcttgttaaatattgaagaagaagttatgaagaaattggtcgctggcgctaaactttctgctgtctatgaagctggtttggaattagcgaaaaaagaaaaacctgacttagtggagaatcttaccaagtcctttgggtttgcaatgggcatagaatttcgtgaaagttcaataattatagggcccaaaacgaacacagtggctaagaaaggaatggtgtttaacattaacattggattggcgaacttaacaaatagtgcttcaacggaaaaggaaggcaagacatacgccctattcattggtgacacagtattagtgaacgaagaacagccagcatctctcctgacacagtccaaaaagaaaatcaagaatgtcggtatcttcttaaaggacgacgatgaggaggaagaagaagaaaaggagaacaagactgaaatacttgagaacggaggtagaggtaaaagaacagctgttatcgaatcaaaactgcgtacggaacattcttctgaggagaaacgtaaggaacatcaaagggaactggccattactcttaatgaaaaggctaaagaacggttagccaaacagtcgagcgggaaggaaggggaaaagttaaggaaaagcactatctcatacaagagtaccagccagatgccgcgggagaacgaagtcaaagaactcaagttatatgttgatcgcaaatatgaaacagttatattgccgatattcggcgtgcccgtaccattccatatatcaacgataaagaacatctcccagtcagttgaaggcgactatacttaccttaggataaacttcttccaccccggagcgactatgggcaggaacgagggtggaaactattcacaacctgatgccacatttgttaaagaagtaacatacagaagtacaaacacaaaggaaccaggcgagatatcccctccatcctccaaccttaacactggctttagacttatcaaagaagtacagaaaaagttcaaaacaagagaagccgaagagagagaaaaggaggacttggttaaacaagacacactagttctctcacagagtaaaggcaatccgaaacttaaagatctgtacataaggcctaatatcgtaacaaagagaatgagcggctctctagaagcgcacactaatggattcaggttcacatcagtgagaggagacaaagtcgatattttgtacaataatattaagaacgcattcttccagccttgtgatggagagatgattatactgttacatttccatttgaaacatgctattatgtttggtaaaaagaaacatgttgacgtgcaattctacacggaggtgggtgagatcacgacagacttgggcaagcaccaacacatgcacgacagagatgacctcgcggctgagcagagtgagagggaactcaggcataagctgaaggtcgccttcaagagcttctgcgagagagtcgagaacatgaccaagcaggaggtcgagtttgatacgcctttcagagaattaggtttccccggtgccccattcagaagcacagtcctcctccaacccacatctggagctctcgtcaaccttacggaatggccaccatttgtcatagccttagaagatgtcgagctggtacacttcgagagagtgcagttccacctcaagaacttcgatatggtattcgttttcaaagactacgcgaagaaggtcgctatggttaacgc

SEQ ID NO: 261 - DNA, 2596 bp, Spodoptera frugiperda
  misc_feature (1)..(2596): Gene targeted: Dhx15; Universal ID: GS881
gaagtcgccatcttgttggatgttgaaaattattggaaaattggaagaattttctgttaattttatttattttcgtgttttatgtgttgtaattagaaatgtctaaacgtcgtattgaagtgatggatccctttatcaaaaagaaaagggaagagaaagcagccgcggcagccaagtcgggcagtagcggcgagtcctcagagtctgcactagctacactaggcaccagtatgcctcctacagccaccagcacgcctggtgtcaaccctttcactggtttaccccactcccagcgctaccacgaactcctacgccgacgcctcgggctcccagtatgggaatacaaaaacgatttcatgagactcctaaacacccatcagtgcgttgtcctagtcggtgagactggctcaggcaaaaccacacaaataccacaatggtcggtagaattcgctgccgtcacagcaggcaaatccaaaggcgtagcttgtacacaaccgagaagggtggccgccatgtcagtagctcaaagagttgctgaggaaatggatgtggcgttgggccagcaagttggttacagcatccgttttgaggactgctccgggccacagaccatactgaagtacatgacagacggtatgttgctgagggaagccatgtcggaccccatgctggaacaatacagagtgatcctcctcgatgaggctcacgagaggacgctggccacggatattctaatgggtgtcctaaaagaagttataaaacagagagccgatctcaaattagtcattatgtccgccacactagacgccggcaagttccagcagtacttcgacaatgcgccgctaatgaatgtccccggcagaacacatcctgtagagatattctacacgccacagcccgagagggattacttagaagccgctatccgcactgtcatacaaattcacatttgcgaagaaatcgccggagacattctactatttttaactggtcaggaggaaattgaggacgcttgtaagaggattaagagggaaattgataacttgggccctgatgctggggagttgaagtgtataccgttatattccacgctgccaccgaacttgcaacagaggattttcgagccggcgccgcctaatcgagctaatggagccatcggacgtaaagtagtagtttccactaacattgctgagacgtcgctgactatagacggcgtggtgttcgtcatagaccctggttttgctaagcagaaagtgtataatcctcgtatccgtgtggagtcgctcctagtgtctccaattagtaaggcatcagcccagcagagggcgggccgcgccggtcggacgcgaccgggtaaatgcttcaggctgtacacggagaaagcatacaaaaatgaaatgcaggacaatacttacccggaaattttaagatcaaacttagggtctgtagttttgcagttgaaaaaactggggattgacgacctggtgcacttcgatttcatggacccgcccgccccggagacgttgatgagggcactggaactgctcaactacttggctgcactggatgacgacggcaacctaacagacctgggcgcggtgatggcggagttcccccttgaccctcagctcgccaagatgttgatcgccagctgcaaccacaactgttccaatgagatcctctccatcactgctatgctgtcagtgcaacagtgcttcgtgcggccgaacgaggcgcgcaaggcggcggacgaggccaagatgcggttcgcgcacatcgacggcgaccatctcacgctgctcaacgtctaccacgccttcaaacagaatatggaagacccacactggtgctacgacaacttcatcaactaccgctcgctgaagtccggagacaacgtccgccagcaactcagcaggatcatggataggtttaacttgaagaggacgagtacggagttcacaagcaaggactactacataaatataaggaaagcattagtcaatggattcttcatgcaggtagcccacttggagcgcacgggccactacctgacggtgaaggacaaccaggtggtgcagctgcaccccagcacgtgcctggaccacaagcccgactgggtcatctacaacgagttcgtgctcaccaccaagaactacatccgcaccgtcaccgacatcaaaccggaatggctactgaagatagcgccgcagtactacgagttaaacaacttcccacaatgcgaggcgcggcggcagctggagctgctgcaggccaggctcgactccaaagcctaccaggaaggtttctagaccacaacctgacacacacacagactgtacaccgtattatgttgttactacacgaatatattgtgaaatacacgcttttgcttggtgtgagttggggtaccaatcctctatacccatacccccaaaatgccggcaaactcttttagtgtgagtgaggttaccagcctaatgactccccttcctaatccccgattccccaagaacccttaaattcctaacctccaaaaggccggtaacgcacttgtaatgcttctggtgtttcaagtgtccatgggcggcggcgattg

SEQ ID NO: 262 - DNA, 2993 bp, Spodoptera frugiperda
  misc_feature (1)..(2993): Gene targeted: CG40470 (nearest homolog); Universal ID: GS874
atgaggcatatcctgtatacaattgagggggaccgacgttgggacactacagtggcaatctgcacgggttcaacccaacacgtacaaataacagaaagagtcaaaggaaacgatgatcagccgtgtccttctgctagtgtgcctgtgcctccgagtcgcgaactctctgccgccggataaggtacccatccacataatcaaaacgcgtagtatagacctgaacaatgcccatggcctatcgatggaaactcgactggacaaggtggtcgtaccaacaggctacaagctggacctagagccttatttagaagatggtcttttcaaaggtcatgtcgccattaacgtgacctggttgatggacggtaacgagatcattttacattgcgcacatgaaattgagctcttggagtctgaagttagagctgatttttctggagacgctaaggaacagaagagggtgtctataactaagatgtcgatggactcgaagaagcccatcgtcactctatctctagagaggacagtcccgaaaggtgccacaggagtcctgaagtttagcttcaagggtaatctggaaacttcttcgactgaagcgttcttcaaaacaacatatgtgactgatcaggaagtagaaaggattatagcagctactcaactgcggccgaataacgctcgacgtatgttcccgtgctttgatgagcctgggtacaagacacccttcgagcttagcgtagttcggcccagggacatggtggcgctgagcaacgtgccagtggctagaactgagaacattcctgatgaaccggacgcggtgtgtgaccacttcgagaaaacacctccaatgtctacgttcaccctcggcttggtcatagcgaacctgaagcagctgggcaactctacgcaacttaaagataatagtggaaatgatattgaaattcgtgtctggggtcgtcccgaatatctggaagctttagaaggtatcaatgagaaggtggtgcgagtgttcaaggagttggctgctttctggcgagtgcccttacctctgaagaggttggacatcgtcgccctgcccaactaccaaggagtcaagcctgctgataattggggccttattgtgttcagggagagtgacttaagcagccgtggctacatccaacttgctcaggagctgtcttatcaatggcttggagctctcactactcctgcttggtggactgatgctcatctgaacaaggctctcgtcggttacgtcgctgctgctaccgcttttaagatcaacaatggctcagagatggaaggcaagtggcccctcaccgtgctatactccctgtactatgagttcagcaagcgctaccctcactcccgcatcactggcatgaagcaagagaccgcttgcaccaagattgagctgctgttccgtatgttcaactacaccctcggagaggagaccttcaagaatggaatctggaggttcttggagtctcgcaaattcaagaccttctctggcgatgacatatggaacgctttgaacgcggccgctagggaagcaaacaagattccccagggtgtggacatcaagacgatgaccaagagctggatcgagaaggacagactgcctctactgaacgtacagagacattacaataataatactgctgttgttacacaaaaagtatatctccgcgaaaggcctcacgatgttcccgaagctgctaagatgtcgtggtggttgccagtggtgatcgcgcaggagagtactctggacctgaaggacactactccagcagcctggatgaaggatcggtcaccactcaccatccccaacatacctgacaaagacaagttcattattgtcaaccctgaggaaattgccccttacccagtaaactatgaccaagacaactggaacctgttatccaacttcttgcaaagcgacaagaggaacatgatccctgagctgacgagagccaagctcctccatgatgcatggaatctggcgtacgctggagaactgtccttcgtgactgccttcaacatgactctgttcttgaagaacgagagacaccatctagtgtgggatcccgtattcaccatgatcgatcatcttggaaggcacatctgtcaatgtctgcatggaaagttccaagcatacgtacgagtactccttagtcctctatatgaggaactggccaaagatgagaaggaggacgaagaaccttggcgcaagcacctcaggtccctgacgaagacgttcctctgccaggctggctacaaaccctgcatcagggacgcgcaggaacagttcagcaagtggatgcaagccaagaaccctgatgagggaaatcccctagccaaccagtacatctgtccagtcttcaaatggggtaccatgaaagaatgggagtttggtctgcaaagagtcataaacttccccccttcgaggaagcagagtgagaggacctatctcctgaagaccttggctggatgccctgaatccgaagccaaaattaacaggctcttgaacataacactgcttgaaggccatgctaacttcacggagaccgatgccttcctgatcttcagcatgttgactggatctgcgactggatacactacgctattccatttcctcagcaacaactgggatgttttgaaagaaaggtatgtaagcagaaccaatctctgggacaacctgatcacctcagccacgtcacaattcaccacagaagaagggttggagctggtttcccagctgtatgtcacccatcaaggccagttcgcgtccgctgagcatatcattgagaagtctatgaggaacatcagagaggaagccaagtggtcggcagaaaacctgccggtgatcgaagcgtggttggacaagtacctggctagtagtgaagttaaggatgacaagtttatccacaagtgattgtattgtgtaatttatttaatttaatatattattattttattgtaataggttaaaaaaaaaa

SEQ ID NO: 263 - DNA, 441 bp, Spodoptera frugiperda
  misc_feature (1)..(441): Gene targeted: Rpl40; Universal ID: GS932
aagaccatcacccttgaggtggaggcttccgacaccatcgaaaatgtcaaagccaagatccaggacaaggagggtatccccccggaccagcagcgactgatcttcgctggtaaacagctggaggatggtcgtaccctgtctgactacaacatccagaaggaatctacccttcacttggtgttgaggcttaggggaggtattattgagccttctctccgcatcttggcccagaagtacaactgcgacaagatgatctgccgcaagtgctacgctcgcctccacccccgtgccaccaactgccgcaagaccaagtgtggacacaccaacaacctccgccccaagaagaagctgaagtagatgaatacatactttcaacattttattcctaagacttaccaatgtcgtaaaaaattgttgtgcaacaactgctctaaattaata

SEQ ID NO: 264 - DNA, 586 bp, Spodoptera frugiperda
  misc_feature (1)..(586): Gene targeted: Rps21; Universal ID: GS942
tggtgactggcaacactgcttccttctttcgcttgtcatatccgtggctagtgtgcattacatacaacatgcagaacgacgccggagaattcgttgacttgtactgcccgaggaaatgctcggccagcaaccgtctgatccacgccaaggaccacgcgtccctgcagctggtgatcgcggacgtggaccccgccacgggccgcgccgccgacacctccaagatgtacgtggtgtgcggagccatccgccgcatgggggagtccgacgactgcatcgtcaggctcaccaagaaggacggcatattggctaagaactactgaagtaacttcttagtcagtaaggatctaattttaaggacacaataaaaacacttaaaaaattttacttctttttatttgatatattttatagagtaaatataaagctaatatagaaaatatcacgagtcaacaatgtgagcgcttgcagcactcggacgcagcgcgccgtcaccgcggccgccgtcgcttgtagtagttctctgtcgacaacaacacacttgtagaacctaacattatgacaatatgtcttcggaatattccctgcc

SEQ ID NO: 265 - DNA, 1296 bp, Spodoptera frugiperda
  misc_feature (1)..(1296): Gene targeted: RpL3; Universal ID: GS943
ctgtctgtgaacatgtcgcataggaaattctccgcacctcgtcatgggtccatggggttctaccccaagaagcgatcccgccgtcatcgtggtaaggtcaaggccttccccaaggatgaccccagcaagccggtccatctaaccgccttcatcggctacaaggccggtatgacccatattgtgcgtgaacctgaccgtcctggatcaaagatcaacaagaaggagatcgtggaggctgtgaccatcatcgagactccccccatggtggccgtcggtgtggtgggctacattgaaaccccacacggtctccgcgccctgctcaccgtctgggctgagcacatgtctgaagactgcagacgtcgattctacaagaactggtacaagtgcaagaagaaggcatttactaagtctagcaagaaatggcaagacgaacttggccgcaagtccattgagaaggacttcaagaaaatgatccgctactgcactgttgtgcgagtcattgctcacacacagatgaagctgctcaagcagcgtcagaagaaggcacacattatggagatccaactcaatggaggaaccatcgaagacaaagttaaatgggctagggaacacctggaaaagcctatcccaattgactctgtgtttgctcaggatgagatgattgattgcattggtgtcaccaagggtaaaggatacaagggtgtcacttcccgttggcacacaaagaagctgccccgcaagacacacaagggtctgcgtaaagtggcttgtattggagcatggcatccttcaagagtgtccttcactgttgcccgtgctggtcagaagggctaccaccacagaactgaaatgaacaagaagatctaccgtcttggacaaggtatccacaccaaggatggcaaggtcatcaagaacaatgcttcaactgagtatgacctgtctgagaagtccatcacccccatgggaggcttcccccactacggagaggtcaacaacgactttgtcatgctcaagggttgttgcatgggccccaagaagcgcgtgatcacccttaggaagtccctccgagtccacaccaagagggctgctcttgagaagatcaacctcaagttcattgacacatcatccaagttcggtcacggtcgcttccagaccccggcagacaaggctgccttcatgggaacactcaagaaggaccgcatccgcgaagaggctgctgccaccgccgccccagctgctgctgctgctgcacaatcttaattattattattgtgacgcagaaaataaacaaaaaaa

SEQ ID NO: 266 - DNA, 962 bp, Spodoptera frugiperda
  misc_feature (1)..(962): Gene targeted: Vps28; Universal ID: GS944
cttcttcataagattgtaggtctatttgtcatcatttgtgtttattagaaaaataaaattcgacattaatttattaaaccttagccttgccttaacaatattgcgatttaagtgaagtgatcgtttatattagagatatcaaaatgcaggacacaagaccagaattatatgaagaagtaaagctttacagaaatgccagggaacgtgaaaagcatgacaacatggcagagttgtacgcagtggtcagtaccctccagcacctagagaaggcgtacatgagggactgtgtgcgtgcgcaggagtacacggcagcgtgcagccgcctgctggtccagtaccgagtcgccttcaaacaagtgcaggctgacgagttccccaatatcgaagcttttgttgctaagtacagattggactgcccggcggctctggagaggataagggagaacaaacccaacctcatcaaggacgacaagggcaacaccaacaaatacatcgctgagattgtctcgctattcataaccctgatggacaagctgcggctggagttccgcgcgatggacatgatccagccggagctgcgcgacctgcgcgacaccatggaccgactcatcatgctgcccgaggacttcgaggggaagatcaaggtacaagagtgggtggacaagctgtcggagatgtcagcatcggacgagctgtcggagagccaggtgcggcagctgctgttcgacctggagacttcatacggagccttcaacaagttcctgcacaaggactgaggggggtcatcggttggtatagctgtgatacctttttttgaggagagaaaatcgtccaatgccttttcctgccttggaataggcaagagggagtttcagacttttactgactaaaagccaacccgttcctgctccttctttttgagtcggagccccggtaaacctaggtagtccgcagttccagag

SEQ ID NO: 267 - DNA, 3059 bp, Spodoptera frugiperda
  misc_feature (1)..(3059): Gene targeted: Sec23A; Universal ID: GS933
aaatcagccagcctctcccgtctgctgaaaattgttataaaattccaataacaaccaatttctgaatgaatactaaataaaacgctagtttattgcatatgtggctggactcgagttgctgcaagcagacttgatcggcgatatggccacgtatgaagagtttattcagcagaatgaagatagagatggaatacggtttacgtggaatgtgtggccctcgagtagaatcgaggctactagactggtggtaccactggcatgtttgtaccagcctctgaaggaaaggccagatttgccaccaattcagtatgaacctgtgttgtgtacaagaaatacatgcagagcaatcttgaatcctatgtgccaggtggactacagagccaaattatggtcctgcaacttctgtttccaaaggaaccctttccctccccaatattcggcgatttcagagcagcatcagcctgcggagttgatccccaacttctccaccatagagtacactataactcgggcccagacgatgcctccgatctatctactggttgtggacacttgtttggatgaggaggaactcggagccctgaaggactcactccagacttccctcagtttgatgccacagaatgctcttgttggattgatcacatttggtcgtatggtgcagattcatgagcttggcacagaaggcatatccaaatgctacgtcttcaaaggcacgaaagacctgacagcgaaacaaattcaagagcagttggcgatcggtcgtgtgaacgctccaaacccacagcagagaccaggcgcccccgcaccgcagccaccagcacaccgcttcctgcaacccgtcaaaacatgtgatatggcattaactgatctgcttggcgaacttggaagggacccatggccgttaggcgtaggaaagagaccgctacgtagcagcggagtcgctctctccttggcagttggtctccttgaagtgacttaccctaacactggtggtagaatcatgctgttcctcggaggaccgtgctcccagggcccaggtcaggtggtcaatgatgagctgaagcagcccattcgttcccaccacgacattcacaaggacaatgctaagtacatgaagaaggctatcaaacattacgaagctctgtctctaagggcggcgacaaatggccattcgattgatatttactcttgtgctttggatcagactggtcttatggagatgaagcagtgttgcaattctactggtggccacatggtgatgggagactcgttcaattcctcgctgttcaagcagacattccagagagtcttcgcgaaagaccaacggggagactacaagatggccttcaatggaaccttggaagtcaaatgcagtagggaacttaaaatatcgggagcgatcggttcgtgtgtgtcgctgaacgtgaagggcccgtgcgtgtcggaccaggaggtcggcatgggcaacacctgccagtggaagatgtgcaccttcacgcccagcactactatggcgatattctttgaggtcgtgaaccaacacgccgcagtgccgcagggcgggcgcggctgtgtgcagttcatcacccagtaccaacactccagcggacagcgacgcgtcagagtcaccactattgcgcgcaattggggcgacgcagcagtgagcctgcaccatatatctgcaggcttcgaccaggaagcggccgctgtagtgatggctcgcctcgtggtctaccgcgcggaactagaggacggacccgatgtactacgctggctcgatcggatgcttatcagattgtgtcagaagttcggtgaatacggcaaggacgacccgaacagtttccgtttgtcggagaacttcagcctgtacccgcagttcatgtaccacctgcgacgctcacagttcctgcaagtcttcaacaactcgcctgatgaaaccactttctataggcacatgttgatgcgcgaggatctaacacagtctctcatcatgatccagccgatcctatactcgtacagtttcggaggtccaccggagcccgtcctactcgacacgtcttccatccagcccgaccgcatcctactcatggataccttcttccaaatacttatttatcatggagagacaatagcgcaatggcgtgagctgcgctaccaagacatgcctgagtacgagagcttcgcgcaactactgcgggcgcccgtcgacgacgcgcaggagatactgcagagcaggttccccgtaccgcgctacatcgacactgaacacggtggctcacaggcccggttcctcttgtcgaaggtgaacccttcacagacccataacaacatgtacgcgtacggaggggcgatgccgattccatcagcggacggtggcgcccccgtgctgacagacgacgtttcgctgcaagtgtttatggagcatttgaagaaactggctgtatcgtccacagcctgaaaacaatatggagtctcacttgcttcagaactgattgctattaggttcaaagtcctttatgcatgttttaagttgtgtgcgattgttccgctgactgaaggaacgcaataatcaagcgaaaatagactttatgtacagtgcaataacagtttacatgagaagtatattttgcttacaaggcggtgatatcgtacatgaatttgtctgacttttatagtgttatgtatctatcataaagttatattatgtatgtactgattgtccctttagtagatagggtatttgacccatttatagtccggttgcatactcgaatatactagggatatacttgatgataaaattactgaacttttaccatcacagtattatattcgaagccagagtactttggatcttatcatctggagtttcagtcttttatcttatgatttagtatataatctaatgtttaaagtctgcatgtgtgtgaagtctaatagtatcagttctgaaaattataatacgtcgcgtggttatccaaattgtttttccaattaagttaaaaataattttctactatacaatgtaaattatatgaaattaaaatgtttatgaa

SEQ ID NO: 268 - DNA, 4458 bp, Spodoptera frugiperda
  misc_feature (1)..(4458): Gene targeted: Sec6; Universal ID: GS934
cccaatttcttgattcaaatggataaactagttttaggtatagacctcgtttaacgtcaaaaccgaaattcgaaatgttaacgtaaatcgtaagcatttactactacagcccagtgatggtgccctggtaattaccagaactaaggtcacaattatgtcatgtgcttaattaaacttatattactttgatcgacttttaactatcataaaaatatgatgctaatggatatcttataatgaaagctacaactgtacaaaagccttgaaacatcataagctttttggttaatagaacttcaggtgttggccctaattttattaaaaataaattaataagtgtcatattgtttatagttatactttcttcgtcttcaatcttatcaattagacgtaacatagttaaaacttgaagtattaatttagtaagtgcagtcatttctttctttattattattgttctgcttgcatgaagtaaatcagtctcctcactatattttggtaagcgatgccttgggcatggaataatgtggaatagttgaggcactgagtatagaaagtttataatttgtggtaaaaagaacagtaaaactgtcttactgaagtgacttaatatagctacaactgcaaatgtcattccagaaacgtaacaaaatgtatctcccacaaacaccttggaaggataccaattatgttttaacagtgctaatgtggtagccaggtagggaatcattacatgcaaagagaatgtgtgagctttaaactgatctcctctcagttcaattatatcaaaaagaatgattgataatgctataataacagactgcccaacttcaagtccattgacaccagccagtatgtttatggcatttgtgcagaaaacagccaacattcccatgtagacataatagagtataccaatattgatggaaactcccaaccactgtctcagtggaattggaaccacaaaagtagttgagttgaagttgacataatacactacaagcaaaggtagtgatgccactgttggcagcaacagtttgtatctccatctcaagtctaaaacatcatcagcaaatccaaggagcagcatgcaacagatggacaacaaaccagccagtacttcggcaaattcattgtgaggaaagtgttgtgtgtccattaagccattgccaaacacaatgggtataaatagaaaacttgttattaagaagacgcaaccagatacaacacctatggcttctggaattttcttcttactagttttacacaaatcaattccaaacagaccggctttaacgaacaggtctgtaagattaggtattaattcatctgttataaagtaggctatcgctgataatattaaaagaattataatttcccacatcttccaggttatatattattatcacggttatattagaaaaatatcatcggcaatgggatttttgtgtttaaaagtaaataacacgtcaagtctctcgctaaggtgatcacttgacatttgacgtctgacgtatttgacttttcttaacaattagttttgttttgacattgaaaagatagaactaaagcagatatttattaaataattaattataatttacttttatctcaattactgcatagatttcactgccattatttcacaattagtgcatagatgaaattaataaaaacagagaaattattgtaatcattctgtgcatggaattgacaaactcaatctaactgtcaatgtctataatgtcactgattaatcatcaatgtcaatgtcaacacttcaacagttatctatcagctttattttctactgtatcgtttcataacacttgttagaattgataataaataattcgtatatatttgttgtaaagttcttgaagtagcgcgaaataattgtaattaactaccaaaatgagtaccatggatgaaatagaagatgaggcgaaagcagctgccgaaaaaatggtaatgaatatgatgcagagaccgggacagctagaaaaggtggaacattataagaaaagaataactcacaagaaggcatcaatagaagctcaactaaaatcagcagtacaaggcaagctggatggtgtcagtgttggtttgaaacagttacaagagtgcttagaagatgtgcaacaagtcagtctaaagatggatgaattagaagagctattaaagagtgtacctcccctggtagcatcactgcaagcagttagggaggaagattctcgtcattcacagtatgttactgccatggacagtctcaaacacatattcactgtgccggagagtgtggctaaaactaaacaatggataggagaagggaaacttctacatgcacatcaatgtctaaatgatttggaaaactccagggatgatctgctatatgaactgcatagattacctaaccaatcttcacatgacaaaattatgctgaaagcttattttgaagatgttgaaatggtgtccaatttgcttgagaaacagataaagctgattttagccagaactttgaatactgttcgtaaagagcccacagttattgtgacagccttgagaatcatagagagggaagagaaaagggatcagatggcactacagcaacaaagtcaaactggatttatgccacctggccggcctaaaaactggcgtgccaaagccttcgaagttttagaatgtgctgtagcacagcgtatagaaggtacacgcgtggacgagcgcgaaaataacaaactgtggttggtacgatatctggaactcactagacaactcatactagaagatttgcgagttgttaaaacgctgtgtgtaccttgctttccaccacattatgatattgtgaacaagtatgtcaacatgtatcacatttgtttatctgcaagtcttcaagatgtagttacaggtgggattgaaggtaatgaatatgttacacttttatcctgggttttaaatacctaccctggcaatgaattaatgggcagttcagaattaaatattgatgtatcaactttaccacctttacttagtaaggaaacaatgcaaaagttacaagatgaatacctgcagaaaatggaatccaactatatggaatggatggagaagactttggagtcagagcgagcagagtgggcggggcagcgcgcgcctgaagtggagtcgcattctaccgcataccacacgcatgcgcccgtcatcatcttccaaatgattgaccagaacttgcaggtcactgaaactataagcaaagaaataacgtttaaggcattgctccttagtattgatcaagttacacgatacgggaatatgtacagagatggagtcatacagtttaagaacgctcacttcgcggatcgttcgcgcgtggcatacttcactcaccacatgatcacgatcgtgaacaacagcgagcagatggtccggctggcgcagcagacacaggcgcggcactggccggctggcagacacgacccacccgccgaggccaagttcgataagatgcttaacaccttccagaatttaagagacgaagctgcccaatttcttcttgaggaagcattccttgacctggaagtgcactttgatgacctatttactgcgaaatggttgccgtccaccataccagtggacactatttgtataacactcgacgattacttccaagactacaatcatttgagagataaaaattttgagtatgttataaacgaagctcaaaacttggtgtataaaaaatatattacagcaatgttgtccaagaaagtggccttcaaaaacgtggaggaagcccagcaagctgccactaaaatagtcaaggaggcgaatcaaatcagatcgttctttaagaaaatagcaccagagggagttaatgtagattggccctttgaagtcatcagtatgctggcagaggtgctgcgctgccaggacgtggagatgctgtcgctggacctgcacagcgtggtggcgaagtgcccggacatgtcggaggagcagctggtgcggctggtgtggctgcgcggcgacgtgccccgcgcgcgcctgcgcgacaccgtggccatcgcgcgcgccagcaggccgccgccccgcgccaactcgcacccctcgctcttcaaacacatcaccttcagcgaccgactgctctcacacttcaacctatagaacatccacctcaactttaccactacatgtattattcatatttatacatcgttttatacacaatatcgcaatgctggtcataaatatcagcccctgacttagtttgaaactagtcgaacagttacatgaataagccgttaaaccaaaattatatttttcatatgtcacaaaagtgtaccttatactgtcatcagcatacaccagtgtttttattatttatttaagaaaatctgtaagaactgtagttagacatatgcacattccgataaatatacaactgtaatacagaatggaaag

SEQ ID NO: 269 - DNA, 1835 bp, Spodoptera frugiperda
  misc_feature (1)..(1835): Gene targeted: vATPase-Vha26; Universal ID: GS945
aatatattctacattccatttcgactgagacacgcgaccttagttgtatacatgtctatggtacagagcgacgcaataattaagattacttggcaacaccgggatcatatgattgttcaatgaagaagcacgtctgataggcgtcgacttacttctttgagccagtttttggttttctggctctttatcggttgttttttcgtgttagtggtgctaaatattaacctacagccatggcgctcagcgatgcagatgttcaaaaacagatcaagcacatgatggccttcatcgagcaagaagccaatgaaaaggctgaggaaatcgatgcaaaggccgaggaggagttcaacatcgaaaaggggcgtctggtccagcagcagaggttgaagatcatggagtactatgagaagaaggaaaagcaggtcgaactccagaaaaagatccaatcctcaaacatgctgaaccaggctcgtctcagggtgctcaaagtacgtgaagaccatgtacgcaacctgttggacgaggcccgcaagcgcctggctgaagtacccaaagaccagaagctgtacactgacctgctgaccgcactcatcgtacaggccctcttccagctgatggagcccgcagtgaccctgcgtgtccgtcaggcagacaagtccttggtggagtcagttctgtcaaaggcccagagcgactacaaagctcagatcaagaaggacactgtattgaagatcgacactgacaactggctgtcacctgacacttgcggtggaatcgagcttatcgctctcaagggacgcatcaagatctgcaacaccctggagtctcgcctggagttaatcgcccagcagctgctgcctgagatccgtaccgccctcttcggccgcaaccctaaccgtaaattcaacgattaagcacttagcggtgacctatattcacacttgttactactaacagtttatttaaagttcataatttgtagaactataatattattaatattataataagttttttcttttgcctaataaattatattgtaataatgcgtacaattttatcgctgtttagaatgtaatttgatgagtgtcgccagaaaatgtacaactgacagacaatgtgtgaccctgtgagtttctgattcctggccgccacaccaggccgctcgtactgtgcattagtttcgcctgcttctatgatgtcaacatcttactgagcctagatattttattataacaattcattcatatagcataatgttatatgtatcttagaggatgtagtttataggatttggagatggtttaattaaaatgttaccattattaggaaatgcaaatataaccatacttatatctaaagttgaaactgttgtaactatggacttcagagcaacttgtcccttgcagtattactgtagcacaagaacacgcaatagtagatgggcgttatgtctatgtgaattattgtagtgtaatcttccttctatgtattatgaacgttgttattgaatgtttcggataaatgtttttcgtgtgtaccgttgatgttatcagtagggagaattggatgctgcaaggatgccgggtgacggcagcatcccacgctatgttcactcaaatcgaggcaaagatttgactgagtgcagggtggtgtcacgcggggcccttgcagctacccaatacattcctactacgtgtttatcctggcaaataacattctggcttgcttcagtcgttactcagagcaccatagctcttgttacgtgtctactatatttatatatatatattatccacatacagcactgttaaaatccttatgtaaatatatag

SEQ ID NO: 270 - DNA, 2977 bp, Spodoptera frugiperda
  misc_feature (1)..(2977): Gene targeted: Vps16A; Universal ID: GS946
agtgattcaagatttactttgcaaataaatattgtattgttttgtgtagtattagtagtattatctgctttcgaaaagaaagtttgaaatgttaataaaactgtgaatagaaatatacgtttaaaatcttgataatttatataaaacaattcaataatgtgttggtagaaaaacaaacaggaaaaaatagcaatcatacaagtctgttatcaacagtgctccctaataaattggagtgtaattaatatttcaaaatgtcggcgttactaactgcagattggttcctattggatacctattacaggaaattcgacctatataacatgaactggtccatggacgatggactggagaacatgatagtcagtggagctcagtacggaggccccatggctgtggtcagggacaggaagcagtttgtgaggatcaccggagctgctaaacctgttataactatctataatggagttggaaatgtgatatcgaagattttgtggaacagtggagaactggtgcacatgggctggtcggacgcggagcaactgttgtgtgtacagcagagtggagatgtgcttgtgtatgatatgttcggagcctatcagaggaccttcaacatgggacaggaagtcagggatactaaggtttacaaagcccgcatattccccagtcctcacggggttggtctagctgtgatcaccaccactaaccgtatgttcctgatcagcaatgtctccgatcctaaagttagatctgtacctgatttaccaagagcgaatgaagccatatcatgctggtgtgtgattggtactggaataattgtatgcagggacaaggaaatattcaaatgtcaaccaggcgaaactagagctattttaatgcgtcccgatataaaaaatccgtacacgcaaatcctatctatagttccatcacaaaacggcaagcatgtggctttgttcaccgattctggtatcttatggaccgggtcgtcggatttcaagactacttattcagaaatagacaccgggtatatcaaacagccgaaggaattgatgtggtgcggatcacaagctgtggtaggacattgggacgacaccctctccatatttgcttcgaccaagggccaatcatcgcaatacccctacgatggaccatttcacctgatacaagaaatcgagtgcgtccgagtcgtctccgaaatgactcacgaactcatacaaaaagtgccgttcgttgtcgagaggatatttagaataaacagcgtcgctcccgaatcttatttgctggaagcttctagacaattccagaaccacagccacagagcagacgagtacataagattagtgaagccaaatctctcaacagcagttcagaactgtatagaggcagctgccttcgagttcaaccctgaagttcagaagatgttgatcagggccgcccagtttggcaagtgcttcatcatggatcccgagctaaccgacctttatgtgaagacctgtcgatggttgagggttttgaacgctgtccgagaccctaaagtcggcataccgcttacttctgtgcaaatgacaagcctaggcgagcgagttctgctggagcgtctaataaggcgccgcctacattgcctggcggtgcacatcgcctcctatttacaacttaaagatggaaggaccagggtgctgtctgactgggcttgctataaggtgacgcaaccgcacttggacaacgagagcgcggcgcgtgagatcggcgacaagctgcgcaacgtgcccggtatctcttacactaccatcgctatgaaggccgccgagaagggaaggaaagctcttgctatcaaaatattagaatatgaaacccacagcaagctccaagttccgctgctcctgacgttgggtgaggggccgaccgcgctactgaaggctacagccagcggcgatacagatctaatatacattgtattgctgcaccttaaagagaaaatggggaaacgagaatttgaactaacaatacgcagtttctcgctcgcccacgccctctacataaagtactgcgcgaacaacaacagggaagcgttgcgccaggtgtacgtacaggaagacgacttccaaggccaggctgcgacccacatacgtgatgccatcgagcaatccaacccggggagcattgaggcatcacttatatctgctagagagtgctataagaagggcaagaatgatctaggggtctcaatctgcgaggacggtcgcaagctatgcaagcaacagtcgagtctacaggagacgtacgggtccagctttgtaggcctttccctacacgactccgtcagaactctactagagctaggggagaccaagctcgctgacaaactgcgatccgaatacaggatgcctgatagaagatactggtggctacgtatactaacactagctgagaaggatgactgggcggaactagaaaggttctcgaaatcaaagaagtctccggtcgggtacgaaccgttcgtggatgcctgtctgaagtactgcaaacaagatgaagctctcaagtatctgccgcgatgcaacgacgatatcaaagtcaaatattatgttaaagctgggttctacgaggaagcggcagaagtggcatttgaacagaaggatgagagcgctctcctattcgtacagaacaaatgtccaacgaacgaaactaccaaacacgctaaaatctcctcactactcgaacgattaccgacaaaaaagtgaacactataatatgtactattaggctaaaattattatccaattataaaataaaaaaaaatatgattttagttcagtgagggtttccccagactaggtaacacgtttaataatttttgtgtccaatatatggctataggatcacactctattacatgggacttataacacaaatggtgaaatgtgtgggtagcggtattacgtgccgtaatgtgcacctctggaatataaaaggcgag

SEQ ID NO: 271 - DNA, 5578 bp, Spodoptera frugiperda
  misc_feature (1)..(5578): Gene targeted: UEV1a; Universal ID: GS935
tattttgtacgatttattgcgataacacagtcttacaaaacaaatcagtgatgacaacaaatgcgatactaatggtaactttattgttatagccccaaaatcacaattttgactaagcttgcatgtcaacatataaataatcaggaatgatttcaatacccattattttactactcacaaaagcaacaattttaggtactcaaggcaaattaaaatacttaaaacaaatcctacttaattcttatgtaaatagttagaagtaaaataatgtgcattaaaatatctttgaatagattacatttcataaaacgtaatttataaatatgaaaaaaattgcacaaacttttattcaagtagtgaatgacatcactacagaactgaaactaaacaaaactgcactcagcaccagatgtaaaacactcgacatgttcaacaaaaattaaataatatttatacacatttacaaaatataatgtacggaaacagcctgaaggtcttacgaccaggcgcaaaataagttttaaagaaaacataaacatttcatgaggtgattacaccagtgttagaagcctcttaatatatttcataaagaaacctttatttagtaaggctaaatatgtataactttaattgttttgtaataaaaataaaacatgcaagaatggcttatttagtaataatattgagtgtaaaccactataatatgcactacaactcttaccaaaattggttcatagcaaatctacacagctttaatttgcagttacgataaaatttactaacttctgaagtaacaattaaaacaactttaaaactgtctgcctgactggttactactaactttaataaaactacgttgaactatcaatttagcaacaattcccaataactcgaaccaatcttataacacagacaattagcaaatcttaatttacagctagctacagtcgaatagtgtacactgaaatgttgagccatttataatattaactttcgtaattggaaataaataatgctagatgcaacatttctgtagatttcgttgtagttttcagtcttgtgtcatttggtccggttgtggtcaatggtaaggttgcaggtacgccgtggtggaagcgaggtcccgacgcaaccaggctgcgttgagacggacggtctccagtgcttgctgcaccgaccgctccgtgcccggagactggtgagtgcggaagaactgctcgatctcttgcgcactggtttcagaggcgaagttttccgttgttgacttcaccaatcgagcgagtaagaagccaccctggtatctatccataaattgctgccaatggtctttgaagaactcccaagcaagatcacgaccatttttactgactgccacagaaactatgacgaatactgtgtcttgagatctcacttcatccgagatggcgaagtcgagaactttcttcagcagtgtggggtcattgactgcaccaagtgcgcgactgatgcggtccttctcctcgtgcaggtcggcggcgcggtacagctccaggaagcgctggaacgtagcctcgtccgcgtccgccaacaccgcgcggtagcacgccgaccgcaggtccgccggcagagtgcacgcacccgttatgtgcttctcgaagcggctctttgcttctttaatagtttcaggatcttcaaagctgatcattttgttgaggactaaactacggagcaatgtgtcgagatggctctctttttcctcggcatcccaacccaggcgtcgagttatgttcgagaatagcttgcggccgtagtttttcaagggcttgtcaagaggcgtatgcgagaataaggcactcagttttgataagcagttggaaatcgaagaccacacagtaaagtttgtttcattagtaaaggcttcaataagtttcagagactcggcggtttgcgtgtggccagcctgcactaaggcgaagcagtcatccagtagaccaaggcgatcaagtggcggtagtgatccgtcgcggatggctgttaccaactgcgccagcattgacgctgggtagcgagttcggtaatatcccactgtaccagggttcagcttaacccaagaagtctctgctacatctttcaagataacttcttgttgtctcttttccaacacagcagatagtgctaccttggaaggttgctcctgtgttgagattgtaataggcaccatccaaagtgtatccccaccttggctaccatcagcacagaacttctgctgtgtcagctttagaaccctgtcagggcctatttgttctgagctcacctcaactacagggaatcccatctgtttggtccatgtggacataacagctccaacaggtttattggaagcctcttccaaagctgcccacaaatcctctgtgaatgtatttttgtactgatgtcttgttagataaatgttcatgcctttacggaagtcatcatccccaatgtatttatgaagcatgcggattacagatgcacccttattgtatgatatgtcatcaaatatttcatcaatttctgatgggtgccctacaggaacttctatgggatgggagtttttcaaacaatccaattctaatgctctgatataattttctgtgacaaattgagtccaaatatcatattcagggaatagatgattgacacagaggaactccacaaatgaagcataaccttcatttaaccaaagatgtgtccaccactccatggtgaccaggttaccaaaccactggtgagccagttcatggcccactactagggcaatccactgcctccttacagctgaagtgtgttcttcatccactagcaagcaagtctctctgtatgttaccaagccccagttctccatagcaccagcagagaaatcagctatagcaataagatcaatctttggcaatgggtaggctatatcgaaatactccttataatagggaagtactcttgctgccacttccaaagcaaacaatccttgtttgctcttacctacaggtgtatacactcttactaaaacaccatcacgagacttcttctccacatagtcatattcacccacaacaaaggctacgaggtaagtggacattataggagtagtgtcataatgaattctcttatggtctcccttcagtttctcttctttgacaggcatattggacaaagctacacggtcagcaggtacttcgagagtaatatcaaatgtagctttaatggcaggttcatcccaacagggaaaacagcgacgagcatctgtagcctcaaactgcgtgacagctgcgtagcgctcttcaccactaggagtcaggtacttgctgcgatagagacccttcattttgtcattaatctcgcctttaaactcgcagtgcagcgtcgcctcgccttccgcaagtgggcggtcaaatagaattgtcgcagtttcatctgcagcgttaagacgaacttcgatcggcgtgataggctccgaaccaccttcgtattgaagtttgacattgttaagctccaaatccaaacaatttagcactatttcacttgttgatctcaataccgatactttcactgcagtttttcccgtgaatgtgaatttctctagattcggaatcaactccaaatcataatgtttgggaaccacgaatcgaggaagacgctgaaattgtttgttttcgggcattgtcactctttctttcacgatcgtgaatgtaggacgcgctgtgtagaaataccgtaatgaccgagtgacagagtgaactcgcgctccaacagcgctgatacgtactacccccctcgcgcgtcgcaatccccactccgtataacggtattcgctacgtaaaaacgtacaatggcgacgaaaatcgaaataatgtgaacaattttcagttggtaatacaattgaattacgtatgacgcgtagtagttgcagcgtcatggaaaacagttatacagcaagagctttgaataagtgaaagttatgctaatgtgtttttattcatgaatgcaacaaacaatattgaatctaaatttaaggttatttaaatgtcatttttaaagttcagttgacgttttgcaaatgttaccataattgaaaacataattttaagttatgacaatgagatccatttcgttagattgagacttagactctggcagtctggcttccccatctatttacaatttagtccggttgtgtcgagacgagtggtagtgcgcgccggtgaaattgtgatcatggcgaatccgtcatcaggcgttgtggttcctcgaaactttcgtctgctagaagaacttgaacaaggccaaaagggagtgggcgatggaaccatatcttggggactcgagagtgatgatgacatgacccttactcactggactgggatgataattggcccccctaggacgccttatgaaaataggatgtattcacttaaaattgagtgtggtaccagataccctgatgcaccaccaactgctcgctttatttctagaatcaacatgaactgtgtaaacagtcagactggacttgttgataatagacaagttccaattcttgctagatgggaacgtgattacactatcaagacagttctgcaggaactgagacgtctcatgacattgaaagaaaacatgaagctgtcacagccaccagagggaagcactttctagtttctattttgaaaagttttctcaatagacccaatctacctgtttttcactttgaattctcacaatgctgtaatattgtgtttcacttacatatttgattttgacttcaatataagtaaaactatgctagtgtgtatcttagacttgtataattgcatttattgtgctctgagtcagtcttttgtgctaagtgcaagattactttgatttcatattaaatttgtagattgggtgataagtaagaattcagtttacatagctcttgaattacccatatagagggtaacacccatttatttatcatattacctaaattattgtggcctttaaaaagttaaacttgcttttggtattattaaggctagttttactgatgtcttggtttaggtaagcgttcttatgtccaagctatataatacctacaactaatcatttatttgtgacctcttgtggaaaatgtgcatttttgttatatttttgggcataatgtatttttaatcctgtgtatctgtgtctaaaatgtaaaggatttatttctatgtaattagttattactgatttcatgtgaccgaaattgcttaattttttaaatagtttaacttgatcaagtgtaaaatattgtaggaaatttttatttcttaggaacataagataaagtaccactggttcattttcagctttgcatcaggttaaatgtttctctcaaacacattactaatgcatgtaatgcaatctaatggctacaaactatcaagtagcttgtcaatttgggaactacataattaataattcagttcccatgcatctgttatgcatgaatttaatgttacaaaccaaatgctaagtcaaattgtttcatagcattaaatatttttaccaatgtataactagcaaaaataaataaatcaaatac

SEQ ID NO: 272 - DNA, 2069 bp, Spodoptera frugiperda
  misc_feature (1)..(2069): Gene targeted: relish; Universal ID: GS936
ttgctttcgagacgccagcgtacaggattccgaataccactgaccatgttaacgtgtacttccagctgaagaggctgtcggacaacgcccgcagcaactcgctgccgttcgagtactaccccgacttctcaggtagcgcgcgcaaacctctcccagacctgtctctgttctcgctgctcctcaacgagaagcgaacagacaccaataacaacaaacaagacaaaaccgaagtcgttagctccactactgatagttacagcgcctccgacgacactgacaccgcgcaggtcaccgacactgacgtcaatggtaacccgcaggttgccgacgtcgagatcatcgacaccaacgagaagagtctcaatgaacttctcgatcaggtcgcggagttagacgagatatactcggagaaccgcacgcgcctcgaaaacatatcttcattgaccaacgacagtgaagatatagaggatttcaatgacgcgggcacttacactagtctgcaactcgctttcaaaaaccccgtagagatttctgaacctgaccccatgtcgtatgaagatgtccaagtccagacgtaccgcggccccatcattgagttcagtccactcaaacgtgatacggatgacgagcgcgcccctccactaccccccaaacgcgtccgtaaagctgcatctaccgagcctttcaaaaccagccagacttcggtcgatagcatcttaaagccgggtcgacagatacccgtcacccgtaacccagaccaattgaaaataaactctgagatgactgtagccaaaagtgaacccgctttgcccccggtcaagaagcgttcgttcttttcacgcctgtttaggagaaaggagaagtctcctgctcccagtgttaaatctgagggtaggaaagaggccaagagtaaaccagtaggtcgatctgtgagcagtgtctcgggggtccgtccttccaagttcaagtcgtcggtgtctcacacctcgttgaaagacaacgcttctggcacaggcctcagttatgccgacagcatcacacatatctctctccacggagacgagaatgagaagtccacatctcagtcgtctttgcgccgccccgccagtctagccccgctgccaccgacagatggcggcactatcttggtggcggaaagcgtgctcgctttagacgcgtctcagttcaagaagttgcaagacgacttagatctaactgacgcggagcactacgcgttgtacatggcggttgccccgcacgcgactgtttcagaattcgatgaaaccagttgctattactcgccggtagatggcagcaaatttcaaaataattaatctccagcttgcgacttggtcatcaaattgaaagcgttacactatgaatacaagtcgactgatgcttgtactcagtctattctcccccacccctaatgccaaaaatttactacattttacaggttttcgacgtatttacatgatttctttttatatttttgtatttaactaatttgttaaccatttacgctgcgattaattttgcagccactttaaatgaatgcaaactttcataagtacaatgttaatattgtgtctgctgttatatttatcaatgtatgtgtaataatgttacccacttaatgttctagagatgaatattaagaagcggaagatggtaaacgactcgttacgaaacttcgatattgaaagtaagttcgggtttataaagttacgtattatttacacgtgtcggtacagggtgtctgacattaacatttatttcaaatctacattcatcattagttagccaatggtttattattattattatgaattaatacaaatgtgcacaaactcattaatttgcgtcatgcaccctgtatatttatttctttagggctgtacccttagtataagtttgctttacgttgaacgaaaacgacacgagagcacattcggagctcttgattggctggcaccgatgaacgaaccaatcagagcgccgaacgcgctctcgttccgattactttggacgtaaagcaaactggaactaagggtgctggtttggtgaaa

SEQ ID NO: 273 - DNA, 2151 bp, Spodoptera frugiperda
  misc_feature (1)..(2151): Gene targeted: diptericin; Universal ID: GS979
tgtgtggagtcttcatgattctgtcatctttgctcatttaattgtcacaatcagtagctcgctacagcacagcggtcgtttctcgttccctatctaaataactctactacttagtgtgatgacaaaaattgtatcgatactcattagagtaggctgtaagtgcaataccttgtgtttggatttgtgacaaaaattttgaagcaacaccatggtgcactcgatccctataacaaacatctccgtcggagtggatggaattattcatacggtacccgatggagatggcgcatcagacaatgagaggaagggcaatgtcacgtacggcatcgacgacataccgccctggtacctctgcatcttcatggctttacagcattacctgacgatgattggcgctatagtggcgatcccgttcatcctgtgccccgcgctttgcatgtcggagacggaccccgaccgttccaacatcatatccaccatgatatttgttactggcctaataacatggctccaagcaacattcggctgtcgactgcccatcgtccagggtgggaccatctccttcttggtgcctaccctggcgatcttgaacctgccgatgtggcagtgtcctccggccgaggagataaacagcatgacggacgaggagcagaagaaggtctggatgagcaggatgtgtgaactgtctggagctattgctgtgtcggcgctgttccaggtgtttcttggttacttcggagtgattggttcgctgctgcgcttcgtgactcccctgactatagcccccacggtggcgctggtggggctgacgctgttcgagcatgcagcagaggcagcttctcagcaatgggggatagcagctgggacattcacactgctgacaatcttctctcaatgcatgaccaacgtcagcatccccaccctcacttggacaagggacaaggggatcactattgtttggtttccactattcaaactgttcccggtattgctaacaatagcaataatgtgggcgctctgtgccatactgacggtgacgggcgtgtttccgccggagcaccctgccagaactgatgtcaagctgaacatcattgaggatgcaccatggttcagggtgccttaccctggtcaatggggagtgccgacggtgagtgtggcaggagtgcttggcatgctggctggagtgttggcctgcactgtggagtccatcagctactaccccaccacggccaggatgtgtgcggcccccccacctcccctacacgccatcaaccgaggcctgggtactgagggtctgggcacagtactggctggactctggggctcagggaatggtaccaacaccttcggggagaacgtgggagccattggagtcactaaggtaggatctcgtcgcgtggtgcagtgggctgcaggtctgatgatagtgcagggagtggtcggcaagctgggggccgtgttcatcatcatcccgcagcctatagtcgggggcctcttctgtgtcatgttcgggatgatttcggctttcggtctatcagcgctccagtacgtgaatctgaacagctcccggaacctgtacataatagggttcagcttgttcttcccactggtgctgactcgatggatggcggcacatagtggcgtcatacagaccggggcggaggcactggacgctgcgctgcaagtcttgctgtctacttctatactggtgggaggcctcattggatgcttcttggataatgttatacctggtacggatgaggagcgaggattagcagcttgggccaaggagatgagtttggatgcagctggagcatctgaagagggagacacatatgacttccctataggaatgggactgatacggaggtggaaatggacccagtatctaccattcatgcccacgtatcaggctggcaagttcactgcgttgttcacgaagaaagagaactaatgaccagggttccataactttagtggtggttcttgtaatgtggaagtcgatcttattgcttatgtgataaggttggacttggcatacgattgaagtgagttctttcttttattgaatgaatattattttaatatatgaatgaatatattacctgtacttacttataagtgttaatatattagaaaaaatgtacatac

SEQ ID NO: 274 - DNA, 1403 bp, Spodoptera frugiperda
  misc_feature (1)..(1403): Gene targeted: spirit; Universal ID: GS973
cgtgtgtatggtgtactgagtaacacatctatagtgtttgtcgaatattgtagtgcttacaaatcatgagtgtcataaaaactcctaaattattatgttgtcttgtgttaatattacatgtgacgattggacaagatgtgttgggtgatactgagccactaaaggatcaagaagaaagcatacgagtgggggctttaccaccagtattagcgggcagtatgagtcagccctacaatatcactgatgatccgtgtgcgccgtataatccacctgtaccagacttcaggggccctggtagaagggttagtgacgtgaaatgttacgagtacatctggcatgtaaaattacgggatataaaagaaaaaagggctaaaagatgtagtgaaatacatccagtccccggtattataggagggcgcatagcaaaacgtggagaattcccaaatatggctgccataggatggaagctatttgtcggaacatggaggtttatgtgtggcggtacattgattagcccgaactttgtgctgacggctgcgcattgctcaaaagcatcggcattggacactaccattgttgacactgtgcctaagatcgttcgactgggctccaacacaattgcggatcgtactgatggcatcgcagcatacgatgtgaacattaaaaacattattgttcatcctcaatacaattcaccgaagcagtactttgacatcgctctgatggaagtggaccagaaagtttacttctcacgagacgtccagcctgcctgcttgtggactaagcctgatattgaatcccttagtcgaactgctctggtcactggctggggagtagttgaatcaggaacccttaaaacatcgcctgaactcctggctgcagatgtggattttatagacacgaatacttgcaatggtcttctcaaaagatcgtgcaatagaaactggtgtgggctgaacgaacatcagctttgtgctggcaaattgaatggtgggaaggatgcctgtcagggtgattcaggaggaccacttcaagtaaacattcctctaccaattaagacacaaggcaatatgaactacgtggtcggtgtgacgtcatttggcattggctgtggattaccagggctaccaggagtttatacaagagtcgcaagcttcgctgactggattgagggcatagtgtggctgggagaaaaataattttgctagggaaattgaatatcctgatgtttatgaacgcctagtaatgctatttttgatccttttcagatcttgaacgctgtcaacagtgactttaatttattatttcgtttatcgttattaatgatattggcaattacctatgttactttatcgaaaaaaataattaagaaagcattaattgattcaggtattaaataactc

SEQ ID NO: 275 - DNA, 986 bp, Spodoptera frugiperda
  misc_feature (1)..(986): Gene targeted: sphynx; Universal ID: GS981
tccacaatgcgcgcgttcctagtaatctgtctgttgtttattcactccgcctggatccacgatactgtggccgaggagttaataggatggcatcagaaagttggcatgaaaaatgctgaacttataaagttgtctgaagaagcgacgctcaacagtcgcatcgtgggaggagccgtggctccagtctacgctcacccctacctcgccggtctactcatcgacatcataggcttctcgtcaccctcagcgtgtggaggatcgcttctttctgcaaatagaatccttacagcggctcactgctggttcgacggatttaatcaagctcatcgaatgactgctgtcctgggatccccattcctattccatggaggtttaagagtatttccatctgccattgcacttcaccctgcttatgactcccgaacattcgccaatgacatagcaatgttatatttacccgtccacattccattttctggccaaattcagccgatagcattaccatcaggatcgcttctacatatggactatacaaacgaaacggttatcgctgctggctatggaagatactctgatgtgacgaaccctacgactaacacgatggcgcgatatgttgcgctggaagtgatagaactacaaaaatgtcgctcgttctacggtaacttggtgctagattccaacatttgtacaaacggctatggaggagttggtatttgccagggagactcagggggacctttgacaatgaatgttaatggacagccagtgttgatcggcgtgagttcatttgtggcacgtgacggatgtgaattacagttcccttctgccttcgcacgagtcagcagttatatcaactggatacgcgtacaaatataaattaacacaagtaataaatattaattccaggacccgctttaaaaaaatgttttcccatagcaatataaaaagatgcacatacgctaaacttaacgtccgccagcatattg

SEQ ID NO: 276 - DNA, 3064 bp, Spodoptera frugiperda
  misc_feature (1)..(3064): Gene targeted: grass; Universal ID: GS976
ggaaaatgacacatgtgtgaccggagtttgtaaactcgtataaaacgaaccggcgctcattctactccggactttatcagcggataacgattcctcgcagacaattaattttgtaaagactacgataatttaataaataaaaataaataagtacaagtacttgaacaatattgtgtgtgtttgttccgtgtgtgaagtgaacgtgttatttaaatatcggtataagaaagtgatgtaattagccataattaaaaatgttgaagtttgcgacaaccgtgactctgttccttcaattactgctacaagtgcaatgcttatactccggagacaactgttctgttggcaatgagttcggagtctgcttacccctgcggcaatgtcgccccatcttcgaggaagtcgtgagagcaggcaaccccataccaccacacatgagccacaaactacacaaactgacttgcggttttgaagctgttatgcctatgatatgttgcataacatcagctcaaacgcaaggagacatcataaccccagaccgcattaccaatacagtagggcctggagacgacacggaaacgttcaccagagggaccctcgacaataagaatggaccaatctttgtggacagtcatcccaacttgagactcctgccccaacagtgtggcaacatcgagagtgataggatatggggcggcaatagaacgcgactgtatgaaatgccttggatggtgctcctgtcttatgattcagctagagggctgaaattgagctgcggtggtaccctgatcaacgagtggtatgtcctgacggctgcccattgtgtctccttcctgggcacccgactgcggctgaatggagtcgtcctcggcgaatatgacgtgaggcaggatcctgactgtgagatgtcagatggcaagaaatattgtgcccccaatgttaagaacgtgtcgatagcatcagttattgctcaccccgggtacacacctcagagtttggtggacgacatagctttaatacgacttgctgaaccggctgatttcagtcttgacagtatgaaaccgctgtgtctgccggtgacttctgatctccagagggagtccctaataggacaaaacgccgtggtggctgggtggggagtgacggaagagggcctggagtcatccgttctgctgagtgtcgaccttccagtcatcagcaattctgactgcatgtctgcttacagagactcactcaagttaaaagacactcaactatgtgctggtggagttaaagacaaggattcctgcggaggagattcaggtggacccctcatgtttccaggaaaaatggggaactttggagtgcggtatgttcaacgagggatcgtttccttcggctccaagagatgtggccttggaggcttcccaggcgtctacaccaatgtagcttactatatgaactggatactagacaatatccgcagttgatgtacgatggtttatacaaaactgaatgaatactccaaaagatatggactgaccccaataatgtgttttatggggacattactatttttttttataccagaaagaaatggaatagtatatgtaaggtacatttttgaatcagatctgtttgtatacgggtactatttctggtattcataagagagaattggtttcaaacatattgaaagacatttacaaaattaaaatgagtttttgactggttatagtatagttaagtgttagtgccatccaagatttgttttccaattgttgaggaggaaccatatatagatttgtaaaacactttcttatacataattaaaccgaaattgtactaaagtcaaaaaaaatatttgaaaatgtattttttctactctcacacaatctataggcacatttttggaattgagataactaataagctctcattgaactactgaattttctttccgacttactaataagtataaattgtgttttaatggtaaatatgacagatggcatggaatctgcgagtaatataatttgtaatgtaaacaggacagctctggtaagctcatttatttctttaaagcatagtgcagcttgcaagatagcatttatcttggattttgttgccgtattttccttatgatacgacaagattattattattgctagtcacgaaacgtgaattttatatgtgcggctcatggagaagaaacgacttattgatatgcataccaccatcgctactgccatcctaaactcaataaaatcaaggcgactagattccttttttgaattagaagaaaaaataatgagtaagagcagcggtattgaaagtaaagcggttatggaccttatatcggaccccagcgcggggacgccggaagataagatgcgactgttcattatttattatctgtgcacatcacaaatacctgaggacgagtacaagaggtttgaggcagcgctacaagccgcggagtgtgacatcaaaccaatggcttatatgaggcgatggaaaggtttcacgaagatgtctagtcaatacgaaggtggtggcaccaagactgtttccatgttctccaaactcgtgtcccaaggatcttcgtttgtgatggaaggagtcaaaaacttggtcgtgaagaaacacaaactgccagtaagccgcacggtggaggcggcgctgagtggcggcggtagcggcgagggtgccggcgagctgctgtggctggaccctcgcgccgcgcgcacggacgcggccgcccgggcgcgctccgccaagcactcgccgcccaccgacgccgtcgtcttcctcgtaggcggcggcaactacatcgagtatcacaaccttatcgattttactaagcaacaagcaacgagcgggacttccaggaaaatcatctacggtgcgactaccctcccgaacgcttcgcaattcctaaaacagctgtcacttctcggcgaggagatacagtagacattcccgtcacttctgatattatattcattatgtatattgtaatatatagtaaatgttataaataattaaattataataaatatcggtgatttgttgcaaggcaatgaaa

SEQ ID NO: 277 - DNA, 1635 bp, Spodoptera frugiperda
  misc_feature (1)..(1635): Gene targeted: pelle; Universal ID: GS974
agtggttttgcatagtggtcgtgttgaacattatttttatactgattacgtagttttgtgatataaaaaatgtatatttacgagttaccgtttgagataaacaaggagttgtgtcgtttgctcgactcagaaaactattggaaggaattggctggaaactggatgaaatatactgcctttgacgtaaacgacatagaacaaacatcaatacgcttgggagtatcaccaacaaatcatttgctgtcacgatggggccagctgaaccatagagtagatgaactttttattttgctgtacaaaatgaagcacatgccagcgctgaactgcctaaagcctgtagtgaatactgacttccacaaattgttaaataaacacagacatttgagcagttctagggataagaaaactgctcttgttactgagcatacaaacaagaagaattcaataaggactgatggatccataccgctgcctgttatgttaatagaaaatggtgaacaactgccgacgacgagtcgagtacaaaatggctactctccgtcgcctaattatgatacaacttcagatattagtaagacatcatcaacacaaggcgacaagctgaacgaagacaatgagttcctgaagaatgtatcagctattcccaagatgagctacgaagagttgaaggaagccaccaacaactggtctgaaagcaacctgttgggacggggagggttcgggcaagttttcaaaggtgaatggaagcacttaccggtggcggtgaagcgtctcctcgacaacaacgaccataacaaggagctgatcagggagatgtgtctcaaccagtacaggcacgacaatatactgccgctctatggatactcgctcggaggtccagaagcttgtctagtctaccagctaatgggtggaggctcgttagaacagcgacttaggatgaagacacatcacccaccgctcacctggtcacaacgatacaacattgcacatggcattgctagaggtcttcaattcctacacacaatggcgggtaccccccttattcacggcgatatcaaaccagcaaacatactcctagacacatgtctcatgcccaagataggagacttcggcctcgctagaaaaggaccctacggagatgacaggacacatgttaaagtttccaaggtattcggcacaaaaccctaccttccggacgagtaccttcgcgaccgttccctatcgccggcagtagacgtgttcagctacggagtggtcgtggtggagatggcaaccgcccttccagccaatgacaaaactaggcctgaacagttcctcagcatgtacatacatcagctgtataaccggggacttgatatgtctacactagaagacccggtgctacttggaaccaatcagtcgaacccagggatgtgtctagcattcatcgccattggactacactgtaccaagtatgcgagacatcaacggcctacaatgttagaagtttataaaaaactaaatgatatgaaaggacctagtatttgcacttgatacatattattgcacaaccttttaataggcttgaagaatactacatcagtaccaacttaagtagtaaatgattttaagacttacgtgggtaatattcgtttt

SEQ ID NO: 278 - DNA, 3721 bp, Spodoptera frugiperda
  misc_feature (1)..(3721): Gene targeted: DIF; Universal ID: GS977
ttattaaaccgtatttatcaaaattagtggcgcgcgataacaataaagtgtttgagttcgcgacataatctgtgacaaattcttggaagtacacaacgtcgagacgagagaccttgataactagttccttggccgagcgagagcgaagaaacagttcacagttattattataggatcattcatgctggagaaagcgcactatgtgtaggcggtccccataatgaggaacaactgaatattagtgatgtttttgaggcgatcactttggcggacccgtcgttcgacgtgggtacagccgccggcatagaggacagcatggcgcgccgcgaccagccctacgtggagatcgtcgagcagccggccagcaaggcgctcagatttcgctatgagtgtgaaggccggtcagcgggatcgattcccggagtgaatagcacgtcagataacaagacttaccctacaattaagatatgcggatacacaggacaggtggtcatcgtcgtgtcttgtgtcaccaaagatgaaccttacagggcgcacccccacaacctggtgggtcgggaacgctgcgagaggggagtgtgtaccatccccctgcgcgtcacggaggagacttgtgaataccagttcaagaacctcggcatccagtgtgtcaagcgacgggatatcgccgaggccctcaccaccagggagaaactgagggtggacccctttagaaaaaacttcgatcacaaaaaccatccccagagtatcgacctgaacgcggtgcgactatgtttccaagtgttcttgccggacgagacggggcgactacggcgccccctgacgcccgtcgtgtccgacgtcatctacgacaagaaggccatgagcgacctgctcatcatgcggtccagccattgttctggcccggctaaaggagggactcaagttattttactctgtgagaaggttacccgagaggacatcgaggtagtcttctatcaggaggaagacggcataattgtctgggaagagacagctattaggatcctggtgcacaaacaagttgctattgctttcgagacgccagcgtaccggatcccgaataccactgaccatgttaacgtgtacttccagctgaagaggctgtcggacaacgcccgcagcaactcgctgccgttcgagtactaccccgacttctcagagatgaatattaagaagcggaagatggtaaacgactcgttacgaaacttcgatattgaaagaatgtactcgacggtagaccaacaaatcaagtcggagccaagagaccggactccgccccaccataacattagcagtccgccgctgcacggctacgcgccgcaatacgaacagaattggcaaatggacaatatgcaaggtggactcggagtgcctgggccgagccacggcgcagtgcctggcagccacgggaaccccttcgcgcaggaaatgtggcagaaccaaccctacggccaggtctcccccgcccacctgcagccggccgccatggcgcagaacctgcaagtcttgcagcccaacctgcaggccatgtcccccaacatgcaggcgatgtcgcccaacatgcaggcgatgtcgcccggcatgcaggccatgtcgcccaacatgcagcccatgtcgcccggcatgcagccgcagtacgtggcggagcgcatgtcccccaacatggcggtgatgtccccccacggacagaccatgtcccccggcatgcagggcatgtcccccatgggccgggtgtcccccaacatgccccagaacatgggccatatctcgcccaacttggtgcaacaccaaaccacttatgcgcagcagcagcaagtggtggtgggtgggacggtgggcatggaggcggagacgcacagcgcgtcgctgagccacctgctgctggaccgcggcgaggcggcgcagctcatgctcaactccagcgagctgtccggcctctccgacctcctcaacaacacgcagtagtgtcccacccccaagggggggacgccacacaaggacattcattatactaagttcccgagttacgctgcccggcgcactctactctcgacttacgaatttaactcacggacacggactattgtgtcgcacgagtgcatggatatatttgtgtgtttgtctgtagacacttttaattagcaattatgtcgtagtacattttaccgatctgggattttcgtgtaagtaaattacaatgtgagcgcgagtgtaacattgatggacgcagcttgttccgaatgtttggttgtccgcgaatatgatcgtactcgaagctatttacaatgttaatcatagaattggtcttttatttacgtacatcacaattgttttaatgctttatgtactgttactgttcatactctgattgctttttattactgaaccgaatacgttttgtatcgcatttatgtatgacaaataaacacctttttacactttaatatattccagatctcttaatactgttctatggttgatctctaaacagatttactttgcattttgttggtgcttttgactaacataacgttttatttttcatcaagtgtttgtatgtacccgtggtctaacagaaagtgtttgtttttatataataccagaaagtaatagacgcaacaatacttttcattgtattcttaaacatttattacgtgatcagacattgatttgtaaatattttaaaataattacgtttaatgcaactccgtatatggaatgttatattctgtctatataatagcatccaataccgtttctacgtgctagaaacgactatctggatacatcttacgacatggacatgcgaatcaaagtaaagttgaagcatgtcatatgaaataattgtttagtggctaatgactccaacgctgtggatttatcatcttgttacatttatttcacttctacataacattttcttaaataattttcctgaaatataaaaattaaacaatattctttgatattttcacaatgactttagtgtaatcaatcccttcgggaaaagtgggatacaatctatatttaaatattcttatttacctaatatcatctacattaggtgctttgaatgatttaaaagttattcaggaaaaaaattgcatattttaatttagtttcatgttttaatcttgtttcaacatttctgtagttattattttgtgccttcgttaagccttccttacctaaatccatggcgtgggataaaataaatgtttaattagttgtcacataagtaatgatgagattttataaatcttggttttatgactttatttaaagatttctttctcatgtaagattagatttaattattaaattcttattttggttatgatttgttaccaaatagtttgtaaataaaaggaaaaaagtattgaattgtttatgaattttgtttgtgttgaagttacataatttctggaattacagtacagtttgtaaaagtacatgaaaggtataaaatattaagtgttaacgttgtgaggagaaatcattgatttttttactaaataagccgtaacttgtttgcacgaatatcgacatgaaacatgtttccgacgcagttggacggagttccgatcattagaccttcggttgagctaattattgttagtgtaccaagtatgagaccgccacagggtcctgcagtaatgatctaatgtgcaatgataataagcattgaaaatgccagttc

SEQ ID NO: 279 - DNA, 2370 bp, Spodoptera frugiperda
  misc_feature (1)..(2370): Gene targeted: Effete; Universal ID: GS980
tttaaatatacatgctgcatttttctgatttcagttttccattggcaagccacaattatgggtccagtcgacagtccttatcaaggaggagtattctttctgaccatacatttcccaacagactacccattcaaaccaccaaaagttgcattcacaacacgtatttaccatcccaacataaacagtaatggttccatttgtcttgatattctgcgctcacagtggtctccagcactcaccatatccaaagtgttgctttcaatctgctcactcctatgcgatccaaacccagatgacccgttggtgccagaaattgctaggatctacaaaacggacagagaaaagtacaatgaactagcccgtgagtggacgaggaaatatgccatgtgatgagtcaattgtgacgtcagcaaacatacacacacatcgccacagcccgggctctaatcccattccctatcccttaatcctgctccccaatcctttgttatccccatcaaacctaaattaactggagattgtaaaaatgttcatggtcatattaggacctgcctaatttctgtcgtatattatggtattgcgaatatattgcatcgtaagtaacaggttcccatgtgcaaatatagtttctgtttttatctaataagaaacattttctataagagcaaaattattttttgttttacattgatgtgtcagtagatatctttacacttgtttagttgaagtttaaagattagttaaatttacatcaattgaatttatgtaattcctaaactatttgtactttaactagatctaaattgcattgtaaaactgtacaatagccatatgttaggaaatggagcgttccttgcttactacttactaattgtccggttcacttaggattttgtcaatgaaatgtaagtaaagctcataagtgttaagaacattttgggtaatgtaagtaagtggtatcacaaaatgagctcgttgacggagtgagtgttaattttttttactagaaaacaactttttttttaagttagtaaatgtagcgtgctacagaccagactgacgttgattgaagtggtcagttttctttcatccacaatattttatgacaatggaaaacgctccaatagttacaacattcagtataaattacagtgtatctcataagatgataagttacgattaatctagaatttttttcaatatggcgatttatattataattttatctaatatatattgtggttgtaaggatacctgcgttgtgatttccacgattgtcctttccattgaaccatcctcgtttcctctgagtaattgaacaaacttactgaagtgaacagcgtcacggcacgagtggctagcatgggtgtgttaaacgttacagctgcaggcaagaggaagctttgttcacttgatctatcactgggagattcaaatttaaagcttttcaaattgtaatcaaccaacaacttgtattttagcttcactaaattgtaagaaacaataaattattgtgtatgtaaataacaccttgagctttatttaggcaacttcctggtaaacgtaagcagctgtaaacattcattcgagtttaattagctgacatagttgattactaggccactgactgagaatctgccaaaataatcgctatgaaaatgataaaaatctcggcttcacagtagtgcaatgacgttttgcttacaacattctaatctataatctagaaggtgattaacatattaattgttgccgtaatcacggtctaaggaaattggaaaagtatacgtacctttctatataagtataatattttattgtctagattgaaaatgcaatttaacatttaaacaagaatacatagcttagtggtaaaagctactctttccttttgaccctattcctacacctgggcgacttccgtacacgactcccacacctctcttaccatggtcgaggcgactcaacttttctattagatctgagattttagtccttactagttgaaaataccagtaaattaataaatcttactaaattcgaatgcaattcttaaaactaacaatgaactaggtagtcattatgggcatggaacatacaggcaagactttcagttgcttctaaattgagtctctagttttccgttatttatactcaaattagcctaacattacttgagtaaataccgtaagccggtctaccaagatgtcctcgatttaataataatggactttactatatttggctagtgcatttgacaattttgttgaaaatcgactttctagtcatgttggtaccttactaccgtaaaacggggtgaatagggacagaagagggttgaataggtacagggaaattcttcatagtatc

SEQ ID NO: 280 - DNA, 880 bp, Spodoptera frugiperda
  misc_feature (1)..(880): Gene targeted: spheroide; Universal ID: GS968
attattcctttgcggaatgtagttaacatgacgtcgcctttcttcaatgcgttcgtagtagttttaagtttcgttttagtaattaaagtttcagcgatagacttcagaataataggaggtttacaagcgcctgaagaatatggaaggtttcatgcgtctgttcagaatttgactggacatcacgtttgtggcggtgctgtggtgtcccagtggtttgtggtttctgcagcccattgtgttcataaagcaaaccctcgttttatgaaaatagtagcaggcactaacaatttagatgttgggggtaaaagatgcgacgtttctagaataatcgtgcaccgacgatacaattccactagcagacaacacgatattgcacttctcaaaacgaaaagtccatttgattttgaaattatcaagcctttgagattaagtaaacgggaacttcatgaaggcgatgagattgttctggttggatttggtgctagtgagccacacggatcttcgagtcgcattatgtacactttagaaatgccagtttttaatcaagaaatatgtgaatatgctatgagatattcgagaccggtcaccaaagaaatgttttgtacattcacgcagatcggtcagggaacatgccatggagattctggcagtccattagtgataggtaatgagctcgttggcatagtgtcttggggaattccttgcgccgtaggattcccagacgtccatacaagattggctccgtacgttgattggattaagatgcatattcgcgaaggctattgcggtgctcccaagcgccaattttttatgcaaagtaatgtaagcaatcagcaataaaagttcagtgtttagttgcaatattaactttattaacgag

SEQ ID NO: 281 - DNA, 4517 bp, Spodoptera frugiperda
  misc_feature (1)..(4517): Gene targeted: Toll; Universal ID: GS975
cagcgtctgggcacggtcgcgccacatgacgctctgatcggacttacgttacagtgaaaacacgcttatcacttacgatacaaaattttgttacggactttattgtacaaaaaccagttaaatagtattcagaaaatcattttgaatgctactacagtgaatataggacgtttcgtaaatactgatgtggacagtttctgtgaaattttgtttacgtttcgaagaacgctaaaacactggattgtgaattgatattgacgcatcatgagcattatctcaacaaggactatttgttaaattgaagccgaaatagtgttcataaattgatggatactacacatccggcaaggggacgcaatacgcgaacgccgacggaaaaaacatgacactgagactatcgtgtcttgttttctttcttccctgatatttgattttccccatcatggctcaacaacaaacttttttaagaaatcgtctctgccaactcttgttttggttcgtcattggcctgaatgtagctgatcaaagctccctgccactaaaatatgaagcacctgatgactgccagtggtggctgagaggacccaacgatgcacacgaggtttccctcacgtgtaaactccgcacaataaacagtgaattcgacaccaccaacttcagtgtgataccttcagaacatacaacatcgttaagaatagagtgtaatgaagaaatgatgtacaaaagctcccttgatgatcgaagtttcgcacatctagtgaaactacgtgaacttgttttagataactgtaaaattggaagatggccgcctggcgtactctccggcttgagagacctccgaaatttaacgattcgaacgaaaaacacggagtgggccgctatgagtttagagatagcatcagaaagctttacggctgttcgacagttggaaaagttggatctcagttttaataacatctggtcatttcccgaaaacttgttttgcccgttaactaatttagtgtatttgaatgtatcttctaaccgtctacaagatgtgagtgatttgggattcagagagcgtgcaatgcatcaagcactgattagtgaacaggatgggccacctccctcggcgccttctatgtcacatgcaacctgctcattagatattgaggtactagacgcttcaagcaatcacttcgtgctaatgccagaaaacggatttatggctctacgtagactcaaagaactgcacattcacgataacgaaatatcaatggtggctgacaaagcgttatctggattgaaacagctgcagataattgatctttcaaacaacaaaatagtcgctcttccgcaagatctgtttaaagatagcagaccggtcatcaaagaaatatacttacaaaacaattctataagtgtgctttcaccaagtctgttcgccaacctagatcaactattagcgttggatttatctaataatcatttaacaagtacttggattaatgagaatactttcaccggtctcataagaatggtgctgttgaatttatctaataacagattaactaaactggaccccaaaattttcaaagatttatacacactacaaattcttaatgttcaacataacatgctggagagcattgcagctgatacgtttgcaccaatgaataatctgcacacgttgatattatcttacaacaagatctctcacatcgatgcttatgccttaaatggtctgtatgtgctgtcattactatctattgataataatcatctcgaagaactccaccctgaagcattcagaaatacatcctccctacaagatttgaatttaaatggcaatcgtttaaagaaagtgcccatagcattgagaaatatgcgattactaagaactcttgatctgggagagaatcagataacgtcattggaagaacccggcttcgttggtttgcataacgtgtatggccttcgtcttatcgggaataaaattgaaaacataagtaaagacgtgtttacagatttaccgtccctgcaaattttaaatcttgcacgtaataaattgaagcacatcgacacgaatgcatttgaaacactatccactctacaggctatccggttagatgctaaccaactaacgaatatccaaggcctatttgtaaatattccatcacttttatggttaaacgtatcagacaaccaaatagaatggtttgattacactgtcattccatcgggacttcagtggctggatcttcacagtaataatatcaaggaactgggaaacaattaccgtatggacaaggaactgcgattgcaaacattagacgcaagtttcaacaaaatgacaaaaatatcagctttctcaattcccagcagtgtggagttgctgtttctgaatgataatcaaattacacaagttgaagcccaaacttttgttggaaaaaccaatttaacgagagtcgatttgtatgcaaatcagataactagtatggatctcaatgcgcttcgactaactccggtcgatccgggacgaccgctacccgaattttatatcggtggaaacccgtttcagtgcgactgtactatggagtggcttcaacgcataaacaaactggaccatcttagacaacatccacgtgtcatggacttggagagcatttactgcaaattattatacaatcgtgaaaggacttatattccgcttatcgaggcggaatcatctcagtttttgtgtacatataaaactcactgttttacgctgtgccattgttgtgattttgacgcttgtgattgtgaaatgacgtgcccatcgaactgtacgtgttatcatgaccaaccgtggtcagcaaatattgtggactgttctgctgctgggtattcagaaatacctagcagtatacctatggacgctactgaactatatttagacggtaataattttggtggtttaacgagtcatgcatttattggacgtaagaacttaaaaatattatatgctaataattctaacattgacgctctgtataataatacgtttagtggactaaaacgcttaacaatattgcatttagaaaagaacaatataaaagagttgctaggtttcgaactgtcgcctctggagaatttgcgcgagttgcatctacaagacaataaaatacattacatcgataatcgtaccttcatggagttgaggcatttagaagtgttgcgcttagaaggcaataacatttacggcttcgcggtgtggcagttcacgatgaatccatatttggttgagataagtctctcgcggaacctttggtcgtgcgattgtcagtacatgcataaatttcgcacttggttcaaaaataacctgggaaaagtggaagatgcattaaaaataacgtgtgtatttgacaacgtaacgaacgctgtgggaccattgatggcagatttcaactcgacgatatgcacaagtcacgtagggggaagctcatccataatcgagaatcaagtaattaatgattatctccctctgctgctaatatcactgtgcgtgttcattataagctcggcattaatatgcggcgtattttattggcgacgcgagctacgagtctggatttactatcattgtggatttagaatgtgctacaaaagtacagcctttgatgatgaagccgataaagatcgtctctttgacgcctacataagttatagcgttaaagatgaggcgttcgttgctcaaatgttggcgcctggactagaatccaccgacccaagtttccggctctgtctacattaccgggactttaatgcctcagcatacgtagcggatacaataatagaggccgtagagtcatccaaaaggacgataatagtcctatcaaaaaatttcattaacaacgaatggtgtcgtttcgaatttaaaacggcactccatgaagtactgaaagagagacgaagaagactgataataatattgctaggcgagcttccgaacagagacatcgacccggagctcaggttgtgtttgaaagcgaacacctgtatagagtggggtgatagacaattttggcaaaagttaaggttcgcgatgccggacttacggaagtgtcagtatcaccggtcgacagtgaatatttacgcttcggtgtctccggtgggggccgggcgggcgccagcgccgccccctccgccgccgccgggcaagctcccccctctgctcggcgacgggctggccctgccgaccagcgtgcacacgcgcgacgtgcacccccaccgcatgccgccgcaagcgcagctctgggcgtagcgtatgctccaacgcaggtaaacagacactgacattacttgcaacgcttaagcgtattagtccaataaaatggtgataattaattttaggttgttccacattatatttattgtatagattaagatttacaaagcctgacacgacgtgcatttatttgtatagattaggtcgctggttttatttttattgttacggaatattttcctgatttctgcgatagtaatttatagattac

SEQ ID NO: 282 - DNA, 3577 bp, Spodoptera frugiperda
  misc_feature (1)..(3577): Gene targeted: Tab2; Universal ID: GS966
aaaatatatattttgttttgtgttcaaataaccgtgctttccatctgttcacgcgtatgttgcaatttcacgaaatatcaagctttggtatgataacaaaagatataaaaattcagccttgtctcggtatgtgctctttttcgtcatgtgtgtatcgccgggattaacatagcataaatggtctctggcgcgaagactcgggtatgtatacgtaactgtccagaatcgtgatttttgggattgtgacgtcacaaaatagacaagacgttatttacagtgcaaattaggtaataaaatgttttattgttttcaccggtgagtagcctaatatttgttgcgctccggtgaagacggaattcgcggcgtagcggtgggcctccgctaggatgggcggcgatgtctgccccctctgagagcgcagcgagccctgcaccgtgcgcatgcaccaatatatcgcttatgcaattgtttcatgagctcaaacagaagtttcctggagtacctgatcatgttgtttcaaacacgatcgaactgtactgtcacgataaacaagcctgcgagaaacatctccacagtgaagtcaaggcctccctaacgcatgcctaccatgcctcctcgtcggcagccgcgcgccagctcaatgaactcaggctcaacctgcccatcaagtgtcgcaaccagcccatagtgaagcatgaagctgtcaaatctacagcactcaaatctatcacttgtgatggccctcagaaagcgatactgagctctgttactgaaacaactgaaaaaccaaccaagctaaacactgatgccaatcaaaatattgttgaaacaaaaaatgaggaaaccaataggagcaacaataacacatcaccagtcactgtaatcaatattgataactgctatgcaaagtacaatgctgagtctcctagcgacttggaactaacaaacgagaactcgaaagaagagaaagttgtacaaccactagaagaaaaagttgtctctccacaaccagaagaaaaagaccttgatcaaccagaaagtaccaactataaaattctaaagagccataaaattaaaaacaacttacatgagagattagaaaaaggaaaggagaagaaaactattaaaaaggaagagacacaacctaagcaagtgagcccacaagaaaagccgaagcggcccaacacattagatttcattaaaccaaatccagatattgcatttaaacagacattaaaagaaccagaggttgatacttgtaggacagtgtcaccagctccatctgtggtgaaagaaagtcaacctaaggagaacaaaagtaatacaaccttcagaccagaacggggctacccgttgaacttgtcagttaatgtaaattgtcatatggacttgagtcgtgcttatggtgatccttggttagaagattatgatagcccgagagctataacatctgtgaatttaactgtttgtactccaacatcaaatatggcaagtcctgtaagagatacgcgggaagatgacggaggtttcgagggtcacgtgacggtgacagtgagcccgagtactacgcggcccccgcgccgcagggctccaccgccgcccacgcatccttcgcggatcgagtcaccgaggcccagcagagcagcacctgaacctccaggatctattactattgatcgtgccttgatcgagcgtcaaaaagaaaggctcgaacggctagcgatggcgctggcgcaggagaaggggcgacttacccagctgacgaaggaaacgcggatactggctgggccgccccccaccgtgtcggcgacgcaacggctacgggacgacgtcgagcgactacggaaccaatgcggcaccctcgcgaagagactggagatgtctggccatgagccagacgacgctgggaacttctacagcaacatctacacggggcagcgaccctcgtcctcctggcagtgccacatgtgcacgttcaggaaccatccgctcctcgacaagtgcgaggagtgcgacatgccgcggatattcgtaggtacgtctccccctaagacgcacgactcgggcttcggctcattccgggataggaaccggcgaggcgccgcctccatcgatgatcttccccactcactaacacagactcagtcggcctagcccgagctcgcgctagcccgacgacagcgcaggacgctaatcaattcctcatttttgccttattcagtgcctatagtgtaaaacagtgcttgagtgtatcagtgtttaaactttataaactcgtgtgcgtttgaagtgtccggacttaaagctaatgaacagtgttgtgcttaagactcacccagcatgttactgttggaatgcaaactttattattaacaatgaaaataccaacgatgtgatgaactatgtacctctgttggtagtttcacatctcgatttattattcctttcattatttaagaatcatatttgtgtatttggactttttgaactttattttcgtatacgtagagcagaaaatgcagctgtgttaaattttatggacttaatgtttttctgttctaagtataattgtgcaaatatgatcctcgcatgtgtgttcgtctattttttatgcgactggattaatatacgacttattctcgtgtaaaatactgagaaatgtttaaacaattgtggacggttatccgacatacacacgtgtacttgatagactgtgattaatactagttcgtggtattagtggatacgattcaacaaagcaccttcaaataataaacatatcgaatggtttaacgcacataataaacagtagtgacttcgacaaagtgactcactatcatctaacaacggttttctcttcgtagtttctgctctataatgatgattgccttcaaactaaggtcggtcgacgcgaattctaaattatttgcacatggacctcattgagtaaatttacaataaatggcgtctttgactggtcagtgcaaactcagggagattaacaaataaccttttttctccatgagacgtttctatgattttagttaacaaaacataggcatttaatgtcttttaatcgatatcataccaagatgtaggtagcttttagttttagagtactaatttacaaaaaattgtcaaggcagcacctaaagtactaagcagacctatgcgtatgtacctaaaacagcattacaaatgcgataacgcaacttcagacgtgtgacgaaatctttccgacagctgtttgctatcagaaacgagcctttaaaacccctccttgtccaatcaaatggtttttactgtattcgaaatgtgtagatgtatttttaaaacatttttctaggtaactagaacgacaatgtattacctaattgtcttgtcttatcacacgaaataaatcagccaatataatacatagtaacataaacataagctatctttttcaaagatatcgccagtttagataaaatttgttaccggaaaccgccaaatattttcgtagtacaatcgaacgaattgattgtgactaggtacaataataccaattaccaggtgatgttgatacaatagtacg

SEQ ID NO: 283 - DNA, 2037 bp, Spodoptera frugiperda
  misc_feature (1)..(2037): Gene targeted: caudal; Universal ID: GS971
ccgctacgtcgcgtgtgttgtatcttgtttctcgtgccggcacctgcaacagaacggtggtgttgtgacagcgagtgtatgtgagatgctcggacggtgaacaaagcatggtgaattacgtcaacccgctcgccatgtaccaaggcaagggcgggcaatacggcagcggctggtacggttggcagcaccaaaactttgaggaccaacagtggtgtgcgtggaatggagctcccgcgggtggcgagtgggctccggatccccatcacttcccgaaacgtgaacctggggagagggaaatagcagacctgccgtctccagctcgtggtgacttggccagccccagtgaaggctcgccagggtccaggcctgcacagccacctgcccctccgcgttccccatatgaatggatgaagaagccaaactaccagacacagcccaatccagatgacgttgttgcaggtaaaacgcgcacgaaagacaaataccgcgtggtgtacagtgaccatcaaaggctcgaactggagaaggagttccactatagccgttacatcactataaggcgcaaagctgaactggccgtcagcttaggactctctgagagacaggtaaaaatctggttccaaaaccgacgcgccaaggagcgcaaacaggtgaagaaacgcgaagaagtggtgatgaaagaaaagggagatcacgcgtcgttgcagcacgcacagttgcaccatgcgacgatgttacatcatcagcagatgatgaatggtatgatgcaccaccaccactaccaccagggggtgttgcagggcgtgcccgagccgttggtgccgggcgtgccccccgtgccgttgctgtgacctcaccagcaacactactgcgcacacagtgacaacttcgcgtagtgacattaagcggtgtccgccacaccgtcgctccttgcacactgaacaatgcccccacaaggcggcccagtgcattcacaatattaatgtgtgatatattcagtgcaatcatgtggaatattagcgtcggaattccagatgaagaattaaaacttttaatactccttcgtactacactgtagtactttaaagctgtaagcggagacacttaagcaagttcctggagtaaaggctttttctttaatgagatacttgccacatgcccggtgcatgttctcacaactttaaccgttattgaaacagtcggtacatcaagaatgtgggacttttggttttagacttaattgtagttatctaagtgttcacgccttatagcaatttcagtacctttcctttaaaacggtatggattaatgtaatgtattgaatttcgtcacttgaatgtaaatatagatataactatatttttatattattattacggttaagtattattacattggttgtttttaagcggtttatttatttctcaatgctgcaagtgccttttcagagaattaaattaagtaggtattaaagcaaagattgtgtagatttgtttgcaaaattgaataataaataaatataattaattaatgatttatttgtacataccattgtttcgtaattgataacgataggtgatgtttatatattttgattgagttgaataattttacattcattgcgaatctcatgacttcacgtatgcagtgaaatgtgctaatgtatggcatgaaatcgattatttatcttcgcatttgtggccttgagaagtaggtgcaacatttttatgttcaatgagattattgctagtattaaatgttctgtaaataatagcttacatttagaataatttattcttattccaatttctatagcatacacaatgaagaattatcactgaattcacaaatgaattgtttgggagaaaacgttaacatagtaataatatattggaacggttacatttttagtatacgtacataatatgttctggataactattatgttagagaaatgagttgatttgaaaatgatatcggaattatatacctgtatatcatcgtaatagaatgcccagtgagaaaatgtaacgtgac

SEQ ID NO: 284 - DNA, 3541 bp, Spodoptera frugiperda
  misc_feature (1)..(3541): Gene targeted: methonine-rich storage protein (hexamerin homolog); Universal ID: GS970
agccgtggtactcacggcttgaaaccaaaataaaatagtttttatttaattaattttatttagttcttttttgttttagtgaaaatcttgtgtatgcaagatgtcggacgcaaagaagaacctgctgttattcttcgaccggccctcggagccgtgcttcatgcagaagggggaagagaaggctgtcttcgagatccctgaacactactacccggagaagtacaaggcgctgacgagcaccatcgccaaccgtttcggagatgacgccggccgctccatccccgtgcgtaacatcgcgctgcccaacctggcgcagcccatggaactgccctacaatgaccagttctctctgttcgtgcccaaacacaggagactggcgggcaagctcatcgacatcttcatgggcatgcgtgacctggaggacctgcagtctgtgtgctcgtactgccagctgcgcatcaacccgtacatgttcaactactgcctctccgtcgccatactgcacaggcccgacaccaaaggactgaacatcccgacgttcgcggagaccttccccgacaagttcatggaccccaaggtgttccgcaaggccagggaagtcagcaacgtcgtcacctccggagtcaggatgccagtaacaatcccggtgaactacacggcgaacgactcggagcccgagcagcgcgtggcgtacttccgcgaggacatcggcatcaacctgcaccactggcactggcacctggtgtacccgttcgactccgcggaccggtccatcgtcaacaaggacaggcgtggagagctcttctattacatgcatcagcagattattgctagatacaacatggagcgcatgtgcaacggcctgtcccgcgtggcgcgctaccagaacttccgcgatcccatcgaggagggatacttccccaagctcgactcgcaggtcgccagcagagcctggccgcctaggtttgccggtaccaccatccgcgacctggaccgtccggtggaccagatccgcgccgacgtgtcccagctcgagacctggagggaccgcttcgtacaggctgtggagactctctccgtcacactgcccaacggtcggcagatgcccctggacgaggagcgcggcatcgacatcctgggcaacatgatggagtcttccatcatcagccccaaccgagggtactacggggacctccacaacatgggacacgtcttcatttcctactcacacgaccctgaccatcgccatctggaacaattcggcgtgatgggagactcggcgacggcgatgcgcgaccccgtgttctaccgctggcactcgtacatcgacgacctgttccagctctacaaggtcaagctcaccccctacggggacgacaagctggacttccccggcgtgcgcgtgtcgagcgtgtcgctggagggcgcggcgggccgcaacacgctgggcaccttctgggagctcagcaccgtggacctcggccgcgggctcgacttcacgccgcgcggctccgtgctcgcccgcttcacgcatctgcagcatcaggacttcaactacgttatcgaggtgaacaacacgtctggccagtcggtgatgggcacggtccgtatcttcatggcgccggtgcaggacgagcgcggcgcgccgctgtccttcgacgaccagcgccgctccatgatcgaactcgacaagttcaccgctgggttacgtccgggcaacaacacgatccgccaccgcagcgtggactcgtccgtcaccatcccctacgagaggaccttccgcgaccagtctgcgcgtccaggcgaccctggctcggaggaggcggcagagttcgacttctgcggctgtggatggccacatcacatgctgatcgccaagggcaaccagcagggctaccccgtcgtactcttcgccatggtctccaactgggctgaggacagggtggaacaagacctggtagggtcctgcaacgacgcagcctcgtactgcggtatccgcgaccgcaagtacccggaccgccgcgccatgggcttccccttcgaccggccgtcccccgcccagagcctgaccgacttcctgcgccccaacatggccatgcagaactgttccatccggttcacagacaccaccatcccgaggcagcaaagacggtaggttgtgggagtatgaggagaaggagtaaggggtgaaaagggaaaaatagataggagatctttatagaaagtacagattgtgaatgtattgtaaacatcttggaaagttagtcccccttattctgtatgtacctatttatttatatccagtaacagcaatacaatacgtttaggtacacctttcctacacagtgtaggtaaggtggtaggtaggcatcaaactaaaaggttctagattaacaacatagatggcgctattatacaataccgaattaataacttattttataaaatgaggtataaaaccaggctgttcttactaataatgataattcaatacattagataagtctagatatttattagtcagttattgtactagtggtgccatctattcgcagttaactgaactgttgggtgtgtaggtctgcctcggtttcgtccgattcgtccgattcgtccgactcgtccatatcgtcggcctcgtctggtcaagatggccaccacaagccgtgtggctgtccagacgaaactgtcactcctgctgaaatagcagctatcataaagaagccatattttggtgacaagtgcaaacgtactagacattacgattatatatttacacctaatcctgttgatcaaaaaatggattctaaaaaggtttaaagaatatccttcataatatctttccataaaattgggatatcttttattaaaaaaaaccaaaactaaaatcacttgtatttcgataacattcacattgaggcagatttacaaatccaaacaatatttctcactcgtaatcgaaccacattattcattaatcataatattgtttcatttggtatttagcactttctttttatgtaatttataaatgtctttaaccaattttctgtgtgttatgtgtaacaaagaatatttaaacaactttagttggtagtagagacattccttctaccatacattcgagaatgctttttactaacacaggcaaatcctaagataatatatcctcttgtatattatttgatactgcattataatattgtatatgtattcattcaactgtcttattatttatatattgtttggctgttactggtacgacctggcattgacaaaggattccgattgtagctgtaggtaattatctaagagtagttgtaagtaaacgggtctgtaaatatactaagtagttgttagttctattgtacatattgtgtaaatacttggattcttgagactgaataaattagccttttaccaaatgtttagttttattcacaactaaccgttgaacattatcgttcaaacatcatattttttatggtataagcgggtaaacgagcctacgtatcacctgatggtaaccaatcgccaccgc

SEQ ID NO: 285 - DNA, 6313 bp, Spodoptera frugiperda
  misc_feature (1)..(6313): Gene targeted: Insulin receptor 1; Universal ID: GS978
gcgcgcgtcgtttgtgataactcgtctgcgcgttatccgctgtttgccgcgtattatgtttacaatagtgttgttattgttttggttattataaaaaatacataatttgagtgctttgtgttgtgttacgaagtgcaatacagaattgaaacagtttaatattaaattgtggatcacaaggagcagacaagtacggcaagcaccgagctcagctcgggtcatgtggtcagcaggccaggggcgcggcacggcgtgatgaggcgcgcgtgcgacaactttgcctggccggtggtggcgtgcgcgctgcttatggcatgcgcgcgcgccgatgccgcaggcgacaacaaactacccacgggaatatgctcgtcgatggatatacggaacaagccggagagcttcgcgcagctgaagggctgccgagtcatcgaaggcacgctgagtatggtgttaatggaacgcgccacgcctaagatcttcgagaacatgagctttcctgaactgagagaggtcaccgattatatagtgatgtataggacgaaaggtgtacaaaacttgggtgacctttttcccaacctcacggtgatacgtggaatgcaactcttcaaggatttcgctctcgttatattcgataatgagcatctggaatctgtggggcttcgatctttggtgaagattgagagaggcggagtgcggatacaacagaacgacaggctttgttatgccaacactattgactggtccctgatcacatcggaacatgctgtcaacatcattaggttaaactacgacacgcgactgtgtgggctgtgcccatatgcacagagtcgagtggacggggaccatcgacagtcgcatgcgcagtgcccgactgatgcaactggtcggctgttatgttgggacgataaacattgccagaaggtttgtccaaagaaatgcggtgacagtgggtgtctaagtaatggcacgtgttgccatccgtcctgcctaggcggttgcaccgggcccacctcctgggactgccacgcctgccgaaatttctccatcggggatggtcctgaaagaaaatgcgttgagaaatgcccctctgacctttatgagttgttccaccgctgcgtgtcggagtctgcgtgccgcgccacgaagccgccgaccaacgcggaggccgagcaccgcggcgccgcgccacacatccgcaagtacaagatcttcaacaacagctgcgtgttcacctgccgcagcgggtacatggaggtgggcgatgctaacaacttgacgtgccaacaatgtccggcgtcgggctgtgtgaaggagtgcgcgggaggcaagatcgactccgtggctgcggcggagcagttccagggctgcacgcatatcaaggggaaactagagatcaatatccgcgcctctggtggtaatactttggcagtattagaaaactcattgggcgacattcgagaaataactggtacgttacaagtggtgcgcgcgtttccactagtgtcgttgatgttcctcaagaaactgaagaaaatcacgggatactgggaaccaggcactaaaaatcgtggtcaagtgatacatatattcaacaacccgaaccttgagttgctgtgggactggccgacccatggccccatcgacatcgtgggaggcagtctctacatacatctgaacccaaagctgtgctacagcaatatactgccgctaaagaacatgaccagggacccgcgctctaatttcactgaaatagaagtatcggaatataacaacggagaccagggttcctgttggccggacaaactgcacgtgaaagcgagtcagttgtatgacaaggcagtagtgctgtcatggaacatgtactgtcctgaagacatgcgcaagttgctcggatactccatctactacatcgcgacagatctcaatgttaccctctatgaacagagggatgtctgctcagatcgatggaatgttctcgatataacagcagacgaagcgcgtaactataccagggatgctcctgctggcaatcaaaattcaaactatctgacgagtccgtgtcacgacaggcagcccttgttctgtccagtctcccatctgactccgtttacaagatacgcagcttacgttaagacatacactacgacgcaggagaagaagggcgcacagagttccattatatatttcgtcactttaccagaacggccgagtcccccggtggcgctgtcggtggagatggtgtctccgcactccgtgttcatcagctggtcgccgcccaccatgcccaacggcaccatcatactctaccacgtcgaggtacaagccaacagctacaacaaacccaagatattggctggaaacactaattattgttccaatccgagtctactcacaaacatgatcacagcacaatcggaggaacctgcggaaacacaggagacaaagactaccggtgacgtcacgaatggctcgtgtgcttgcaaagaggaggataaacctatcactcggttcaattcccgcgtagaggaagatcgcagggagactatcgcgtttgagaatcaactgcagaacactgtctacataaagaatgataatagaccgaaagcgaagagagtgaagcgatccgtcgaccataccctgaatagtatgcttgtgaagctgacaaaaaactttgagccccaggttggactgaactacacgaacagcacggacgaggaaggctacgtgaagtcgttatacttcgagctgggcggcaaggtgcagacgttgaaggtgacaaacatgcgccacttcacgtggtacaccgtcagtatctgggcctgtcgctccaggcacgagaacgagtccgtcgccgactacaacgacaagtggtgctccaaccgatcctacaacaccttccgcactccagaacgagtgaacgcggatatagtggataatttgcaagcagaggtggtcgtatcgaacaaaacattgggtgaagtgaacgtcacgtggaaaccgccgaaaaatcccaacggatttgtcgtagcgtactccgtgtattacgcccgtgtcgacgatagcttatcatcggcgccgtcggggctgcagggctgcgtgacggcggacgagtacgagaggaacgggcacagctacacgctgcgcagcctggcgcccggcaactacaccatcgaggtcacgcccatcaccgtcgccggcgcggggaacgtctccgccgtacacccgcccatcttcattccggagaggacggcggagaatgcgtacgactggatctggggcgtggtgggcgggtgcgtgatgatgggcgtattgctgggcggcggcgtgtggtacgcgcggcgcggcctgctgccgtcggccgaggccaacaagctgttcgccagcgtcaacccggagtacgtgtccaccatgtacgtgcccgacgagtgggaggtgccgcgcgcctccgtcgagttcatacgggagctgggccagggctccttcggaatggtatacgaaggtcttgccaaaggtatagaaaaaggaaaagcggagacacggtgtgccgttaaaactgtcaatgagcatgccacggatagggaacgtcaagaattcttaaatgaggcgtcggtgatgaaggcgttcgacacgttccacgtggtgcgcctgctgggcgtggtctcccgcggccagcccacgctcgtcatcatggagctcatggagttcggggacctcaagacctacctgcgctcacaccgacccgatgcagattcatcgctcccgcgcaagggtggcagtaatcctcctacattggagaatatactgcagatggctatagaaatagccgacggtatggcttacctatcggccaaaaaattcgtgcatcgcgatctcgcggcgcgcaactgtatggtcgccggagacctcaccgtgaaggtcggggacttcggtatgaccagagacatctacgagactgattactataggaaaggcaccaaaggcctattgccggtgcgctggatgagtccagagagcctcaaagatggagtgttctcgagtagtagtgacgtgtggagttacggcgtcgtcttatgggagatggcgacgctagccatgcagccgtaccagggcctgtccaacgagcaggtgctgcgctacgtggtggagggcggggtgatggagcggcccgagcactgcccggaccgcctgtacgagctgatgcgcgcgtgctgggcgcaccgcgcgccggcccgcccgtccttcctgcagctcgtggccgacctggcgccgtccgcgcacgcgcacttccgccagcggagcttcttccacacgccgcagggacaggagatgtactcgctgcagcgcaccaccatggaggacgaggcggagctggccgaggtgaacgtgggcgccgtggccacggggtcgggctccaacctgttcggcgtgtcggggcgcctggcgtcgtgggtgcgcgagctgtcgtcgctgcgctcgcgcgcctccgaggacgcggccgccgagccgctgcagccgctgcgcgccgaccccaaggggaacggcggcccgctgccgccctgctagccccgcttgccgcgctagtcccactagtctcgctagccgcgctggccccgctagccgcgctagccccactagccccgctagccgcgctggccccgccggactgcgctagccccgctagcagcgtggccccgccggactgtctacgtggcggggcacgcccgcatttattacgatatcgtgcgcccgacggacggacgctcgagttttgttgtttttcaagagttcgacgcgagagggcgatgcgtttgttttcgtgtgacgattcgttttcatatcaggaaagtaatatttttgctgagacgatattaagtgagtcgatatgtctcgacgtgaatcctatatagtttacctcgacgttattatatagttatagatcaatgtcacttttgacatagcctattaatgttaagtttaccgtttaagatgtaaagcgtgtatagttttatgtaggcgagatcgtgtacaaattatttttattattattaatttcttgacgtatagttcggtaccttgctactgtttcaaagtgaataagtaacaggtgtcaaattcgttgaagttgttatgttgttgtgtcaagtacttttattacaaagtacttgcgaaatgaatttgtcacttgtcctaatcaatacaagttgcatctgcttataatactcaactgttggatttgccgctttagatatcagctatttttctacttgtataaagtataatttgaaatattgaattaaaataaaattaaccaccaaagatttggaaagtaaacgtctaaatttacaagtcttttatgctgttacttattgtagctgtgttatcaatgtttgcaaagataattatataattgtattagagtaattatacagggtcgtttcaaattagttgtaactggttttagtaggaacgtgaagcaacacccacagtttagtcataatgcgtaagttaacgagaaaagacgaaaaacgtgttacttagtgttgccggccatacgtatcgatatatgtgtaacatgcagactgcacgagggctcgcagctcgtgcactttgcacaccgagtacttactagtgccagttaagtgacaacgttgaatttaaatgactatataccgcaacatttgtttaacaacatgttattgtgtacgtgaatataaatgtaggtcgtaatcatgttacagttattctcaaatacaagttacgccgataacaatgtgttccccatcgacgacttaaatgcaatagacaatacctgccactattgttaaatagttatattactagactgcatactattattgtttaactacgagtaaatgttatgtccccaaagtatgagtgcaactgacagagtgcctatatttacagtggttcatcgcttgtatttaatgggttgcaggactttgatactatctcaaaactaaacatgatcgagacgattataagtgatcttactagtaagtaagcaccgataatgtacatccttatcagtataaaagttgtttttttaagaactcaaccatttcaatattacgttgtctgtcatcttctgaactatccagttccatactcatttcttctcaattgatttcgtcacaagtttttaaataatggttatgtatttcgatgacaaatacgttactacgttatttgggtaaaaaactagaatatattaatgtacatttcaaagttattctgatagctaattctgccatagaagaaatttataacaaaaatacgcctaatataattaaaa

SEQ ID NO: 286 - DNA, 2291 bp, Spodoptera frugiperda
  misc_feature (1)..(2291): Gene targeted: Sh - Shaker; Universal ID: GS965
ccgccgtgccacggcgatactcgttggcccgtgccttgcgaccgccacgcggatcttcgtcgtaacatgactcgccgcaccggctgaggtgtctctatacgcgtccagaatacgcattacgtaaggtaccgtcgccaacaacgctccgccggcggcggtcaccgtacgatacatatccaaaatatatcgaatcgttctcacataatcatcgtaatagtagttaacgtaagtcgtccatcggcagcgataatttttcgcgcggttgaacgcgcgctcggagcggtcaaaatttggcggtaaagttgcgcagatcttgagtggtgcgtgaagcaccccgggctgtcgggcggtcaggagtacgggagagcgggcgtgccgcagtgtcggcaggaggcgcgatgcgaccgcggacccgcgcaccgctttgaacacattatgaggagcgttgagagccaggatcgggcgtagcgcgggagcgaggcgagaggcgcaaggccgaggcgcgggcatggctcgcgagtaaggtggcggccgcggcgcgcgccacgagccggccggtaggcgccgcgggtcagccggcctctccgtcacgtcctcgcttcagcgcaccagctccgacccgatgacacattgtcattgagcagccaccattgcacgcatagagttggtcgagaaatgggggctgacgcctgtcctcaggccgaggcaggaatgcccccgggccccagaggaaggtggagaccaaaggtccctgccgaaactgtgcaaccaggaagaggagcctggacgtccaccccagggcggggtggtgacgttcgaacccatacaacacgaccacgacttctgcgaaagagttgtcatcaacgtaagcggcctgaagtttgagacgcaattacggacactgaaccaattcccagaaaccctgctgggggacccaacccggagaatacgctatttcgatcccctgaggaacgaatacttttttgaccgcaaccgcccctcgttcgacgcaatcctgtactactaccaaagcggcggccgcttgcggcgccccgtcaacgtcccactagatgtcttctccgaggagattaaattctacgaactcggagaacaagccacaaacaagttccgtgaggatgagggcttcatcaaggaggaggagaaaccccttccctccaacgagcgccagcgcaaaatctggctgctcttcgaataccccgagagctctcaggccgcacgcgtcgtggccatcatctctgtgtttgtcatcctcctttccatcgtgatcttctgcctggagaccctcccagagttcaaacactacaaggtctttaacacaaccaccaacggcactaagatcgaagaagatgaagtccctgacatcactgacccattcttcttgatagagacactctgtatcatatggtttacgttcgagttgatagtacggtttctggcgtgtcccaacaagtttaacttctttagagatgtcatgaacataatagacatcatcgccattatcccgtacttcatcaccttagcgacagtcgtagcagaggaagaagatactctaaacctaccgcgcgccccggtgtccccgcaagacaagtcgactaaccaagcgatgagtctggccatactgcgggtgatacgtctggtgcgggtgttccgtatcttcaaactgtctcgacactccaaaggattacagattctgggtcgtacgttaaaggcgtcgatgagggaactgggcttattaatattcttcttgttcattggtgtggtgctgttttcatccgcggtgtacttcgctgaggcgggaagtgagaacagcttcttcaaatccatacctgatgcgttttggtgggcggtcgtgacaatgacaactgtgggatacggagacatgacgcctgttggcgtctggggaaaaatcgtcggatccctgtgcgccattgccggtgtgctcaccatcgcattgcctgttcctgtcatcgtgtccaacttcaattacttctaccaccgtgagaccgaccaggaggaaatgcaatcgcagaacttcaaccacgtcaccagctgcccgtacctgcctggcactatgggcgagccttacctcagtgggaaggaagacgacgaggtttgcagtgatcaatgactgttcaacagtgttgttatttatatttataatatgaggacttaagtattcgcaagagacgatatccgtgatattaccgcgtaagacacaaacgagtgcagtttttgatttttttgtgtaaatattttagttagtaagcgac

SEQ ID NO: 287 - DNA, 2032 bp, Spodoptera frugiperda
  misc_feature (1)..(2032): Gene targeted: SK - small conductance calcium-activated potassium channel; Universal ID: GS967
ctgttgccaacaactagtacaagaataatccgccagagttcgcaacctgaatctagcgcatgcgcggcgcactgccctcatcaccctcaccaccaccccagcgcctctctgcggcaattgcgagaaccaggagacggcatcgctggcatcgctgcggactctctgcgaatcaacggtggtatgcgccctttcaaacagctgcggaagccggtgtcgacgctctcgatcccgggcgcgatgaaggcgtactcgggtggcgggagggacgcgggggccgaggaagcaggcgtcgctctagtcggcgtgcacagcgagtacccgcgcttcggcgaagaacgagcgcttggcggcggcacgtacaagggcggggggacagctaagcacaaacccaatataggatataggttaggtagaagaaaggcgttattcgaaaaaaggaaacgaataagtgactacgctttagtaatgggaatgtttggtattataattatggttatagaaaatgaactttcaagtgctggtgtatatactaaggcgtcaatatattcgcaggcgttgaagacgcttatatcaatgtcgactgtgattttacttggcctaatcgtcgcgtaccacgctttagaagtccagttatttatgatagacaactgcgctgacgactggcggatagcaatgacgtggcagcggatagctcaaattggcctcgagcttgctatctgtgccgttcatcctatccccggtcaatatacctttacctggaccacaaaacttgcaaacaaaggcggagttataggcgttgaagtagttccttatgatgtcacgctgtctctgccgatgttctttcgactctatttaatatgcagggtcatgttacttcacagtaaattattcacagatgcttcgtccagaagtataggagctttaaacagaattaattttaacactagatttgtcttgaagacacttatgacaatttgccccggcaccgtgttactagtttttatggtatctctttggataattgcgagctggactcttcggcagtgtgaaaggtttcacgatgaagaacacgctaacctactgaatgcgatgtggcttattgcgattacctttctctccgtcggttttggtgacatagtgccaaacacatattgcggcagaggtattgctgttagcaccggcattatgggagctggatgcacagcgttattagtcgcggttgtttcaagaaaattagaattaactagagccgagaagcacgttcataacttcatgatggacacacagcttactaaaagagtaagtattgctgtgatataagttcatcacaattattgttaatctaattaacagggggcgggatgtacagcattattagtgaccgttgcttcgagaaaattagagttaactagagcggagaaacatgtccataacttcatgatggaaacccagctaacaaaaaaggtaaggtgactgttactcgactaacagtcgaaggacacgatgaaggtaagacttataagctaggttatgctaatgatgattaagataatttaaatgataataataaaaatctgcttaaaattaatgcttgacacaatgagtaacacacactagatgaagttaatggaattgccagaatacacaatagtgatgacactttgctagaaactaaataaaagaaacatgataaaattattaataatgttcaaaacagttttaaggtaaatagcttcgttcacaataagcttaagaaacattggacaccatgtgatgtcatgtgttaaaggtggataaaagacatactaattatctgattgaattcatggatacttacagctgaaaaatgccgctgccaacgtgcttcgggagacgtggttaatatacaaacacacgaggcttgtcaaacgagtccatcctggaagagtgagaacgcatcaaagaaaatttttattagctatttatgcgtgagtatgtgtgtttctattttattggtataacctcatctaaggtaatttactgaaagtggtgt

SEQ ID NO: 288 - DNA, 9490 bp, Spodoptera frugiperda
  misc_feature (1)..(9490): Gene targeted: chitinase1; Universal ID: GS982
gacccgcgacgcacgcgcagcttcacaatacacataggggtggtgttttgtttataccctattgtatttgcacaagataatattttattatagatataagttccaagaatcgctgaaagttccccatcatggggcataactttactctatggtgcgctttagcgttagcgttatgcgcatacgtattagcatctcctcgcgcaggattcgcattcacaagaagtgctgttgaaacggttccacaacatgatcccatagctgctccaatacgtgcctccgtcgaaagtataccgttaaggagtgttcgtgacgagggagatgagaggttaccattacgtgatgctgtagaaaagaggccaatctcactcatagagcctgaatctgcttttaaactaatcgaggatgctgaggtaatatctgatgaagaaagcgacagtgggttgaaatattatggcgcagccggtcatctcaacgtcatgacgcgcaatgatgagagactacagctaggaaatgcgaacctacaagcaatgcagcagacggtggcgggccccacggcgcgtcgtatcgtggtgtgttacatgaagtcctgggcggcgtacagggctcctccactggcattcacggccgcactagtacccaaatcttgcacccacctccactatgcattcgccactatgcacccccacacgtactcagttattcctaacaatgaagattacgatatcgttaaaggtggttatcgcatagcgactggactgaagaaacgtcttaatggattgaaagtgatgatcagtgtgggaggggaaggcacagatcgcctgttcagcgaaatggtacaagaaccagaaaggcggactatgttcatagaaagcgccgtgaactttatgagagaccatgacttcgacggtttagatcttcattgggtttatccaggtgaagacgaaaatgaaagagagttgttaacagcgctcctttacgaactccgagagaagttttcgtcttatggattcttactttctaccgttttgccgccattcagatatcaaatagaagacgggtacgatttgagtgctgtcagtggagccaccgactacacagtgctgcaggcgtgggacatgacccatggcaagcctgacgagccaccttcaagggctgtacagcatagtccattgcgtagagaccctggagctactgccagggaccaaagatatgataacattgaattcatggtgaagttcatcctccgacacggcatgaatgctgagaagttggtgcttggcattccattcttcggaagaacatactctctggcatcgtcagcacgatctgttcctggcgccgcagttaccgggtggggtgaagagggagcttatactcaaaccaaaggactcttatcctacttcgaaatttgtatggccgaacgtgaaggaaaaggatcaagtaacgttgacgaagctggaaacacttacatagtgtttgataaagaatgggtcacatacgacactccagtaactgtcttggaaaagatgaagttcgtggtaactacaggcctagcaggtgctgcggcatggtcaattgacatggacgatttcagaggattgtgtggtcagccattcccactcttgagcgccatttcaaccacacttaatggtgaagcaatccaaacagatctatcatcattgaaaataggttcttgtgaatctgacaatccatacttagcgtcagacgtagactcttgcgcacacttccacttctgcaccggcggtatcagctacagaatgccttgtgaagacgatcgtctttacgatccctctacaggattctgcggccaccaagatgtagcaaaatgtatgccaggacaaagtctgcgaatcagcgttgaggacgccgctcgtttcctatcccaagcgtatgaaaatgatttcgagtggaatgaacctagcaaagacatgacagcaaataatgaccctgagcgtttgattgccgtgatggacagcaaaaaaagtaaacaaagtgacaaactcgtggtatgctacatgacaagctgggcattctaccgtcgcggtgatggaaagtttgttccggaaaatattgatacaagactttgtacccatgtggtctacgcctacgcatcgctctctcctgatgaacttatcgccaaggagttcgatccttgggccgatgtcactaacaatctttacgagcgtgtcacatccttgaaagatgtcaaagttctccttggtttgggaggctggacggactccgctggcgataaatactcccggatggtatcatcacaagcatctcgcagcaagttcatcgaaaagttgattccattcttgcgcatgcacaactttaaggggcttcatttggattggaactaccctgtttgttggcaaagcaattgtaaaaagggagccgtttctgataaacctaatttcgcaaaattcgttcaggaactatccaaagcattgcatggagctggtatggagcttggtgtcgccatttctggttataaagaagtgatcgagtccgcgtatgatttaccagttctatcgaaagcagccgatttccttagcaccatgacttatgattaccacggaggttgggagaaggctaccggacaccacactccgctagttcctccttctaaagaagctctagcgcattattctgttgaatatgctgttaaagctttgatcagcggaggagcagatcctaagaaacttcttctcggattatcattttacggtcaatcgtatagactcaatgatatgaacggagcgaagggccctggatctcctgcatctggacctggtgaaccaggagagtttacaaaacaacctggaatgttggcttactatgaaatatgctaccgagtgaaaaacttaagatggaagacaggcagacaagataatgccggcccttacacatactccgacaatcagtgggttggatacgatgaccccaaatctatcactgaaaaggtggaatgggcattacgccaaggtatgggtggtgtgacggcgtgggcaatagacctggatgacttcagcaatcgttgctgtgctgagccgtcacctctgctccgtgcagcaggccgcgctctcggcaggagcgtgccatctcctcccacaaccgcctgcgagagaccaccagaacctgtcacaccggcagcacctactacaaccactgctgaatttgatggttcagcaggcggcagtcacgaccaccaccaccacgaccagacatcaacgacatggccgagctggaacccgtccaccaccacccacagcaccgctcaaacatggtggcccgcagccaccactcccatgaccaccacctcatctactacaactactaaacgtccgactactacaaaacgacctgctaccaccaccaaaaagcctgcagcagacgccggaagcctagaaggaacagcatgcaatgcaggtgagtaccgggcagcgccaggcgactgcgaagggtacctgcaatgtgaaggcggcgtgtggcgcaaacatcgctgtgccccaggcctacactgggccgcctccgtcaaccgctgcgactggcccagcttcgccaagtgtaccgcaacggcaagtagtgaagcaagtactgccacatcgaccttggctccagtggcgtcccgtccgccaccgaggccgacgaccaccaccactagacgtcccactccgactaccaccaccacaaggcgaccgaccactaaaccaaccaccataggaatacaagcagacgaaggtcctcaagagggcgattcgtgtattggcgaacaatacagttcagtacctggtgactgcaatgcgtacctgcattgcgatggcacctcgtggcatatgcagcgctgtgcgcccggcctgcactggagcaacgtacagaaacactgcgactggcccaagtacgccaagtgtgaagtaccaaaatctacaacagccgctcctaagcccactcggccatcgcggccagctacaacgacatccaccactacaactactacaacaagagctcctccatcaggcactgcatttgaaaattcaccctgtggtggaaacgacatgcatgctccctcaacgacttgcgatacgtacctactttgcgttggaggtcgctggcgtaagcagctctgtcctcctggtcttcactgggacaagaggacgcgacgatgcgattggatcgaattcgctatgtgtgaagtgggtaaaccaacgaaatcaacaacaagtacaacgaccaccaccactaccactaccacaacgaccacagcacgacccacgacaaccactagaagacccacaacaaccactaggagacccacgaggcccacgaccactaaaaaaccacttgccgacgaagctcaagtgcccggaaagggttgcaacacaggcacatatcacgtacatcccaagtgtgagaaattctacgtgtgtgttaatggtatgctgatagcacaaagctgtgcaccaggcctcgtgtggcggccagaccgcagccagtgtgacttcccctcctcgtcttcatgcactgacaagcgacagagtgacggtccagttagcgactctactaactcccaatccaccatgatgcaacaacttaacgaagaaccacccaagtactgtgaaagtggagcatatgcccaattgccatcagactgtacacgataccttcactgcttgttcggcaaattcgaagaattcgcctgcagcgctggattgcactggaatcaggagaagcaaatctgtgactggcctaagaatgctaaatgcaaacgcaagcaaggttcttctaccacttccaccactagtacaacatcaaccacatcccgacctgttcaaatggatgtaattgagccagagcatgaacacatctctgaacatggacatgatcattcacaccacgatcatgagcactcccacgctaaaccaactaagccttcagcttccgtatccagcatacatacacagcctgacataagtaccaaaccggctcttctaaattctcgttacaaactggtttgttattacacgaactggtcttggtaccgccctggtatcggcaaattcagtccagaggatatcgacccaactctttgcactcatatcgtctatggattcgctgttcttggagatgatggtctcattatgcctcatgacacctggtcggatattgataatggattctatgaaaaagttgtagagttcaaacgctatggcatcaaagtatcactggctatcggcggctggaacgactcggccggcgacaagtattctaagctggtcaacgaccccgcggctcgtgcccgattcgtctcacacgtcgtgcaattcctcaaaaagtacggcttcgatggattggatcttgactgggaatatcccaagtgctggcaggttgattgctcccagggtcctgactcagataaagaagcttttgctgaccttgttcttgagctgtctgccgtatttaagccaaagggtctgcttctgtcagcggccgtgtctcccagcaagaaggtcatcgacgcaggttacgatgtgcccgtgctggctcgccatcttgactggatcgctgtaatgacatacgactatcatggtcaatgggacaagagaactggccacgttgctccattgtactaccatcctgaagacagcacgacctacttcaatgcgaactacactatgcattactggatgaaaaagggggctccagcgaacaaactaatcatgggaatgccaatgtacggacagacgttcacgttgggcagcgaaaaagattctccacaatccctaagtatgagcagcgaatatactggtttgaatgctccggcttcagacggtggagaagctggagaatataccagagctaaaggtttcttgtcttactacgagatttgcgaccgcatcagatacaatggatggaaagtagttaaagatccttaccagcgtatgggtccgtacgcgtacaagggtaaccaatgggtatcattcgacgacgtcgagattatcaaaaagaaagtgaacttcataaaatcattaaacctcgctggtggtatggtctgggcacttgatcttgatgatttcaagaatagatgtggtcaaggaaaacatccgcttgttaacgctatcaagaatggtttactggattccaaagtggaagaagatacaatcttatctgacccattaattgaacctccaaatgcaatagatgatgattcagatgacattcaagtacgtcctatccaaaaaccgacttcaaggcccacacagatgacgacacaggtgacgacaaattggtggcaaacaactgcactcacaaccaccactaagagacccgtaactactgtcagcactaatctggaagaccgttacaaggtggtctgctattacaccaactgggcttggtatagacctggtccaggaaagttcacacctagcgatattgacccctcgctttgtacccacattgtgtacgcttttgctgtccttgatactaagcgcctggtgatcaaaccacatgacatctggctggatgttgaaaacaaattctacgaaaaggtggtgtctctgaaacagaaaggcgtcaaagtagttcttggacttggtggatgggatgactcggcaagtgacaaatactcgcgaatggtgaacagtccatccgcacgaaggaagtttgttatccacgctctagactttatagaacagtatgaattcgacggattgaatcttgattgggagtaccctaagtgctggcaagtgaactgcgaaaagggccctagctccgacaaacaaggctttgccaaccttgtcaaggaacttcgtgctgcattcaggcccagaggtttatcggtgtccgcagcggtctcggctagcaaacgcgttatagatgctgcttacgacgttgcaacgttatccaagaacctagattggatttctttgatgacatatgattaccacggccaatgggacaagaagactggccacttgtcgccaatgtatgaaggcgaagatgatgaagataaaactttgaacacaaacttctccgtgaactactggattagcaaaggagcgtctcctgagaagcttattttaggcgttccattctatggtcaatcattttccctggaagagaatgcagggtctggtcttggtgcaccttcctacgcaggtggagaggctggcgatgaaacgagagctagaggcttcttatcattctacgaaatatgtgaccgtattagaatgaagggttggaaggtatcacgagacccaggaggccgtatgggcccttacgctagctttgaagaccaatgggtgtctttcgacgatgactatatggtacgccacaaggcagagtacgtccgctcgatgggcctgggaggtagcatggcgtgggcccttgaccttgatgactttaatggaaagaattgcggttgtggaaaatctcctctccttgctactattaatcatgtcctgcgaggttcggaagcaccaccgagatgtccgcttgaagaactacaagccgatactccagaaccagcagaggtccctgaacctgaagtgccagaaccagacgatataccagccatttctgtcgaagaagttgataccgatactaacactgataccgataccgattcaaacacttatgtcgatactgataccgacacgggcacagatttagcagaaagcagtggtccaagtcttgaaggcggtgcatgcacaggaactgtattcaaagctgatgagaacaaatgcagcaaatattacttgtgtcttaatggacactggatgcaattagaatgccctgcacctctgcagtggcacaagaaccactgtgactggcctgaaaaggcccaatgccgaacgaaggctgggctgcgaattggaggcctagaaccggaagaagtacaagacgacaagtctattgtgggatgctacttcactaattgggctttctataggcccggcaaaggcagttttggaccagaacaagtagacccatctctatgtacacacatcatatacgcatgggcacatcttgatggcaaatcctttagtttagtacctggaaactccgagcttgatcttgaaaatgatttctacggcaagctaacacagctgagacaaactggtgtcaaagttattatcggtgctggtggccttacggattctgaaagcagaaaatggagcacaatggtatcaagtccagaaaacagaaaaacatttgcggattccgtattgaaattcttgcaaagatggcacttcgatggtattcagattgcttggcagtacccaggatgccgacagactccatgcacaagcgaatctttcaactataaggagagggacaatttcgccgacttactgtctgaattatcaagaaagcttcgtcctcacaaccttgagatatcagctatggtcactgcttcgccagaaatagcgcaactagcgtacaagcctcacatactagcctcagagttagactgggtcgctgttgctgctaatgattactatgcatcctccacgggcaagacgtcgtatttagtgccacttcagtctagtcatggaagcaataacttgaacgcgtccctgtcatactggacgagcgcattgccgcctcgtcatgtggtgctcggtataccagcgtacggtcgctcgtacaccctgcgcagctcttccaactccgggctgggagctcctgtcaccggccccggggaacctggaccttacacacgcataccaggcctcttggcctattatgaggttgcggatggtttagcgagtcgccaatggaaggagagtcgaacttctgagggtacgttcagcgtccgtggtggacaatgggcatcgtacctgagcgtggtggacgtgggaagtataggcgcagcagcgagacgagctggtgcccgcggtgcggcgctgtgggctctcgacctcgacgtgcgaggagactgctcgctgctgaacgccatgcgccgcggtctcatggaacctgacctacctctcgagcagtgcgcgcctgccgcgtgaacacaacaacctcggagtacccagaaacctataccttgttttatgttaaaacggtgacttctctgtaagataccgattatgagactgtcgcgtgggtgctcgtccaagacttaatttagtttatacttaactatttagatatttcattgtgatatttttgatacgtaggtgaattgtctacttactaatatgtgcgtagttctcgcgtaaattccttgatttttacttgacggccagtttaatgtagagatagattattttttgtactttgtacctactatttaacaatgtgtcatgtactgattaggtcaaaattccgatttaagtaaaagtgcaaggaattaagataaaatgatgatttgacatcgaaaaaagagactacttttaagctcgttctctataacattttgtaatttttttacaatatcttggagccataagattag

SEQ ID NO: 289 - DNA, 3938 bp, Spodoptera frugiperda
  misc_feature (1)..(3938): Gene targeted: ATPase; Universal ID: GS972
acctacttaatttttagttcagtgcggtcggtcagtaattctgatttgcggtgaatagtggataacgtttagtttattaattttatcagggaaaatacgagttgagttggtataaataacaatagcagcataaagtgatagtggcagatgtgtccatttttcatccaggatcgtttacatgtaatcgccatggcagtaacgaccaggtgtctataagactaagttgttgtttcggcttcaggaagacgaagtgctctggcggtgcacagaatgccgatcgcgccgcgcggccctccgccttcgacgccaccctaccacctgcttctccgtaggagacctagcttaaccctcaagtgtccttcgataatataacgtctaactttttgtacgcctcttttataccgacctataagtataagtacgcagtgtttaagtgtcgcgcgcaagtgtgagtgtatatgtgtgtcgatggtgcggccgacatgggaaagtcctcggcgagaacacatggccaagagaatgaacggagaatcaaagcgaacaacagagaatacaacgcgcagttccgctacgccagcaacttcatcaagacatcgaagtattcgatcataacgttcctgccgctgaatctgttggagcagttccagcggctggcgaacttctacttcttgtgcctgttggtgctgcagctgatcccggccatctcgtcgctcacacctatcaccactgcgataccactgatcggtgtacttgctctcactgccgtcaaggacgcgtacgacgattttcaacgtcatcagaacgattcacaagtaaaccacaggcgggcgaagactctgcgcaatggcaagcttgtggaggagaagtgggcgtctgttcaggtgggagacgtcatcaggctggagaacgaccagttcgtcgcggcggacattttgctcctcagcagctcggagcccaacggtctctgttacatagagactgccgagttggatggggagacgaatttgaaatgtcgtcagtgccttttagagacggctgcaatggggcaggacgacgcacaactgggtgctttcgacggtgagatcgtctgcgaaacgcccaacaatctacttaataagtttgaaggtacgctgagctggcgcaaccagcacttctcactcgacaacgacaagatcctgctgcgtggctgcgtactacgcaacacgcagtggtgttatggcgttgtcgtattcgccgggaaggacaccaaactcatgcagaactccggcaagaccaaattcaagcgcaccagcatagataggctacttaattttcttattatagggatagtattcttcttgctgtcgatgtgcgtgttctgcacggtggcgtgcggcgtgtgggagtggctggtggggcgctacttccaggtgtacctgccgtgggacacgctggtgccggccgagcccacctggggcgcgctcgtcatcgccctgctcgtcttcttctcatacgccatcgtcatgaacactgtcgtgcctatatcgctctatgtctctgtagaggtaataaggtttgcccagagtttcctcataaactgggacgagaaaatgtattacgaaaagactggtaccgcggcaaaggcgcgaactaccactttaaatgaggaacttggccagatccagtacatattctcagataaaacgggcactctcacgcagaacataatgacgttcaataagtgttcgatagcgggcgtttgctacggagacgtcgtggacgaaaccaccggtgaaactatagacctcgccgaggtacgtcatagttcggagccgttggacttctcgtttaaccctgaatacgagccggagttcaagttcttcgacagcacactcctggatgcagtgaagaggggcgacaagaatgtccatgacttctttcgactgctcgcgctgtgtcatacggtcatgcccgaccagaagaacggcaggctggagtaccaggcgcagtcccccgacgagtctgccctggtttcagcagcaagaaattttggtttcgtgttcagagaacgctcgcctaatagtattacaatagaagtaatgggtaaaacagaggtgtatgaattgttatgtatattagattttaataatgttaggaaaagaatgtccgtgatattgaggaaggatggtgaaattaggttatatacaaaaggtgctgataatgtaatatatgacagattaaaaaatggaaatcaaacagatgtaaagtcaaagacacaggaacatttaaataaattcgcgggcgaaggtctgcgcacgctggcgctggcatggcgtccgctggaggagcgcgggttcgccgagtggaagcggaggcaccacgccgccgcgctcgcgctgcacgaccgggacgagcagctcgacgccatctacgaggagatcgagaccgatctactgctcatgggcgtaacagcaatagaagacaaattacaagacggtgtaccagaaacaatagcgaatctcagtatggccggcatcaaggtgtgggtcttaaccggcgataaacaagaaacggcgataaacatcggctactcgtgtcagctactcacagacgacatggcggaggtgttcgtcatagacggcgcctcgtacgacgacgtcgaccgacagctcgccaagtgcagggacagtatacgagtcgtcaacacattcatgcctcatggttcatcggaggcgaagtccccgggcgaggcgaacggcggcgcgggcgtgtcgcgcgcgtcccccgggcgggccaacgtgaagctgaacgcgcccgccgtgtccgtcgtgacctttagcaacgagtacgtgtccggtggcgccccctactcggccgactcgcacgaacacaacgacgacaccaacgggttcgccatcgtcatcaacggacactcgctcgtacactgtctgcatcctaaacttgaggagaaatttttagatgtagtattgcaatgtcgatcagtgatctgctgtcgagtgacgccattgcagaaagcaatggtggtagaactcatcaagaagagtcggaaagccgtcacgttagccatcggtgacggcgccaatgacgtctctatgatcaaagcggcgcacataggcgtgggtatatcggggcaggagggcatgcaggcggtgttggcctccgactactccatcgcccagttccggttcctgcagcgcctactgctggtccacggccggtggtcctactacaggatgtgcaagttcctgcggtacttcttctacaagaacttcgcgttcaccgtctgtcacttctggttcgcgtttttctgcggatttagtgcgcagacggtgttcgacgagatgttcatctctgtgtacaacttgttctacacgtcgctgccggtgctggcgctgggcgtgttcgagcaggacgtgtccgacaccacctcgctgcagttccccaagctgtacgcgccgggacacaccagccaactcttcaacaagaccgagttcatcaagtccacgctgcatggctgcttcacctcgctcgtcctcttcttaataccttatggtacatacaaagatggtttggcgccgaatggtttaattctgtcagatcatatgttactaggaactgtagtagcaacaatattaattatagacaatacaacacagatagccttggatacgacatattggacagtgttcaaccatataacgatatggggatcactggtgtcgtacttcgttctagattatttctataactacgcgatcggcggcccgtacgtgggctcgctcacagtcgcgctcacacaggccaccttctggttcaccgccgtcctcaccatgatcatcctgatggtgccggtggtgtcgtggcgcctggcgtgctcctggacgcggccgacgctggcggagcggctgcgggcgcgccagcgctggcgggccgccgcc

SEQ ID NO: 290 - DNA, 1820 bp, Spodoptera frugiperda
  misc_feature (1)..(1820): Gene targeted: Vacuolar ATPase A; Universal ID: GS969
gattccggttacccggcctacttgggagctaggctggcgagcttctacgagcgggctggaagggtcaagtgtctgggtaacccggagagggaaggttcggtctccatcgtgggcgccgtgtcgccgcccggaggagacttctctgaccccgtgacggcggccacgctcggcatcgttcaggtgttctgggggctggacaagaagctggcgcagaggaagcacttcccctccatcaactggcttatctcttacagtaagtacatgcgcgcgctggacgacttctacgacaagaactaccccgagttcgtgccgctcaggaccaaggtcaaggagatcctgcaagaggaggaggacctgtctgaaatcgtgcagctggtcggaaaggcgtccctggcggagaccgacaagatcaccctcgaggtggccaagctgctgaaggacgacttcttgcagcagaacagttactcgaactacgaccgtttctgcccgttctacaagacgaccggcatgctgaagaacatcatcacgttctacgacatgtcgcgacacgccgtcgagtccaccgcgcagtccgacaacaaggtcacctggaacgtcatccgtgacgccatgggcaacgtactctaccagctctcctccatgaagttcaaggaccccgtgaaagaaggcgaggctaagatcaaggcagacttcgaccaactcctggaagacatggcggccgccttccgcaacctcgaggactagacgtcccccggccgcgaccaccgcgccccgcacacgcctgcctctactaacgatggggagacggacactactggcgtggtcgcttaactatatcataggcgacagtgctacgcgagagcgtattgttaatacactaaatagacataaataaatgtgttaaagtctacgtagtgtgaataggtttaattatattattactcgtatttcaatgcagaattcgtaattccaattgttgaaattgaaaggaacgccgcgcgccaggccgccggacaacccgctccatttgtaaatacacgaacaaatgccggcggcccgccgcgccaacgttcgcagttaattagttgttatttatatacagatatatacatactatttatacactaacaatcaattattttatgcccgtttgtacttcgcgtgttaaacaaatcattatatcgagtaccctcttgcattccacgttattattagagtttaatcgaagtaacatgtttttgttgaaaaaaataaaagcaacagtttttttacgcttttcgtgtctcgatatcattgttaccagcattttgatgtaccggaaatgtataagagttcagtattatgtttactttgatagttctcgctgtgttagctagcggcgtcttgtacaaaaatcatgcgctataataacgtatagttacttgctgtttgaacctctgtgaagttacgtgttgaggagacgaaagttataaataaatacaataaagtgtatatattggtgtttcatttccctgttatacgagctaacgataattccttgtagttgcacgctactgggctgtaaatgaaccatcggcctgtgcatcggcatcggtgttattacaatctttgcttacattttctcaaagggggtaaggggataaataaaattacagtgtttactaggatctcgattctggcgtacacaggcctgggccatgtctaatgaatatattttctcgaaattcagttattagaagtaggagtggcttgtcacatcataattcgtacggatcgtaggtaattttttaaataaattatgtatgaatatgaaaaataac

SEQ ID NO: 291 - DNA, 264 bp, Spodoptera frugiperda
  misc_feature (1)..(264): Gene targeted: methionine_rich_storage_protein; Universal ID: GS1046
actgaacacttacctgtactacttgcacatgagctacccgtactggatgacgcacgacatgtacaccgtgaacaaggagcgccgcggggagatcatgagctacgccaccatgcagctgctggccagattcaggctggagcgtctctcacacgagatgtgcgacatcaagcccatcatgtggaacgagcctctcaagaccggctactggcccaagattcgcttgcacactggagacgagatgcccgtgcgcagcaacaacatgat

SEQ ID NO: 292 - DNA, 1031 bp, Spodoptera frugiperda
  misc_feature (1)..(1031): Gene targeted: SK_gene; Universal ID: GS1026
acaacccccggcgctgctgttgccaacaactagtacaagaataatccgccagagttcgcaacctgaatctagcgcatgcgcggcgcactgccctcatcaccctcaccaccaccccagcgcctctctgcggcaattgcgagaaccaggagacggcatcgctggcatcgctgcggactctctgcgaatcaacggtggtatgcgccctttcaaacaggggctgctcctctgtccacaaaccctgtcgcagacgcgccgagcccggctgagacgtgcattcactgaagccacgggggatactgttaactacgttaaaacggcctgtacaggacctcgggatcagatgacacagctgcggaagccggtgtcgacgctctcgatcccgggcgcgatgaaggcgtactcgggtggcgggagggacgcgggggccgaggaagcaggcgtcgctctagtcggcgtgcacagcgagtacccgcgcttcggcgaagaacgagcgcttggcggcggcacgtacaagggcggggggacagctaagcacaaacccaatataggatataggttaggtagaagaaaggcgttattcgaaaaaaggaaacgaataagtgactacgctttagtaatgggaatgtttggtattataattatggttatagaaaatgaactttcaagtgctggtgtatatactaaggcgtcaatatattcgcaggcgttgaagacgcttatatcaatgtcgactgtgattttacttggcctaatcgtcgcgtaccacgctttagaagtccagttatttatgatagacaactgcgctgacgactggcggatagcaatgacgtggcagcggatagctcaaattggcctcgagcttgctatctgtgccgttcatcctatccccggtcaatatacctttacctggaccacaaaacttgcaaacaaaggcggagttataggcgttgaagtagtaagtaccagtaataaacttcatattaatagttttaagtatgtagttatcattgtcatacaaagcattttgggcc

SEQ ID NO: 293 - DNA, 927 bp, Spodoptera frugiperda
  misc_feature (1)..(927): Gene targeted: troponin; Universal ID: GS1048
gtgcggctccgtgttggctgatccatctgatagggccatcttcttttttaatttcgtaggacacctagaccaacactaccacaatggcggatgatgaagcgaagaaggccaaacaggccgagatcgaccgcaagcgcgcggaggtgcgcaagcgcatggaggaagcctccaaggcgaagaaggccaagaaggggttcatgaccccagagaggaagaagaagctcaggttgctgctgcgtaagaaggccgctgaggagctgaagaaggagcaggagcgcaaggcggctgagaggaggaggatcatcgaggagcgctgcggcaaacccaagaacatcgaggacgccaacgaagcaatgctcaagagaataatacaggagtatcatgaccgcgtgtatgtgtgtgagggccagaagtgggatttggaacatgaagtcaggaaaagagattttgagatcgtagacctgaacaaccaagtcaacgacctcagaggcaaattcgttaaacccaccctcaagaaggtttccaaatacgagaacaaattcgccaagctccagaagaaggcggccgagttcaacttccgcaaccaactcaaggttgtcaagaagaaggagttcaccctggaagaggaagacaaagagaaaaaaccagactggtccaagggcaaacccggcgatcagaaggtaaaagaggaggaggttgaggcatgaagtagtcctagctccctaaaccatacgtgaccttcgtgtacagactattattgccatacacggaacattcatgtgataccccatcctgtaattggctagattcaatacctgcattgtcaccttgtgctgttgagtcggccgttatggcaataatttccactacctttctcatattatttattattaattcaccaacttcgttgtcgcccttaagattcag

SEQ ID NO: 294 - DNA, 4801 bp, Spodoptera frugiperda
  misc_feature (1)..(4801): Gene targeted: P102; Universal ID: GS1045
gtgtgtttgaaacttgtggggtcaattctgtttaagaagacagaatccgctcgtctcttattacacattcaggccgatcaccgttgtcgacgcaaaaaccatcgcgctatgaatcccaacgacacatatctataatacgtgcatgacatcacccaaaggtcgcgcagtatcgcctgctcgccgcgggctcagagatcactagtgcgccgtgatcgcgctaggaacaacgtagttcttatccaaaatgaaaatcgcgctggtattattggtttgtttggcggcaagtcgggccgacgacttcggacaagccgcgggccagatcttcaacagcatcttgcccaatttgatcagcaactccgtgactggtcaacaaggaaacactgctaccaacactcttcagcagatagggactgttgtaggcggtgtcgtcgactatgccaagaagaagagctacgaggatttgctgcgtcaggtgcaggattccaccacagatgaggacatcctcagggtgagcgaggaaatgttcaatgcggacatcaacaacgctttgccatacatccaagtgaatttgcaaggccagaccagcgctctgtcgaaggatgacaaagcaccgtctaccctcctgagcgtgcctgagaatgtgtggaacggaccaacaatcaggccttttgtagccctcttcgacaactaccacaaaaacgtgatcaggccagaatttgtcacacccaatgaggaaacggaacaagtcacttttataaacacaatcctcgcgaccggaccagtcaggagtctaatgaactttttggtcagcaaaggtctgacacagatgaacgaatacaatgagcaagtgcaactgctgaagaagatctggttcacaaagtacgcgcgccactggaccggcctgtgcaagtgcagctgcgccttcgagaacattttcatggccgaacttaagtccaacgacgtacttggtctgcacagttggctgttcttcgccaagcgtgaacaagatcgcaaagccaattacttgggctacatagacaaactggatctctctgggaaaggaatgattctgaagcagcactccgtgttgagtgacactaaggacgccccggaggtgacgatgttcgtgggcacctcgcccgagttggagctgtccctgtacaccctgtgcttcatggcgcgccccgaccggccctgcaggctgcgctacaacaacgtcaacttctccatacaaaccaagaccttgaagtcggagaacgtactcctcatcgacaccgcctaccccttctactaacgtaacaaaccataattatacatacctcagcatatactcaatacatatttatataactaaacgtaaaaaaaaaactgtgtataactagctctctggatatttacttcaatagatataaataaaagatcccaaaattacgagctacgtctctatgtactaaaacaaagataatgccagcaacgagcaagttatcagagcgcgatccgtgggtcgtgctctcacgataagcatgtaattagacacgaatttcgcaataacttattacaagtattgataacgtgtgtaataataaaaccaattcaatgtaaacatctttttattgcaacatttctctaaaacactgcgactatagcacaatacatggatacagctgtattctaaaacactcgatgttgttattgacaataaggttacaagaagtgcaatcggtgaatttattgtctaaaatggcacaaagtgttttgataccaactagtcgtcggtacaattcgtaacactaccattacaaggggcatgttagtgagttatacaaggtactacgtcacaacattatctactaaacggcaaggaacaacaataacgttttcaacgcataaatataaatgtctaaatgaaaccacaaaaaaaattatttaactaaataacatatgtagtatagttatatacagcacattagaatgccattgtagaaaactgattaacataaacatatgttgtaaaaatactacatattataattatatttaactgcaatcacgttaatcactcaagtgaataaatagcttttaaaatgcttaataaaaataagattcttagtagagataataaaatgtactgaactctgacctcctttgattacagtccacgagcacaacaaatgcttcgcgtctatcataatataatcgtagttaacaaacaataaacatagtatacagaaaagtacaaactttaaacagatcaagatgtaaatgaacccgtaataccatattacagaatactaaaagttatctttcaatacttcaatgttttatgaaatatatacagcgtgtaatgaaagggtatatctacgtgaacgggttaaaatcccgcaggcgatagtaacaactccttgtatacgtaaaaaaatatatagttgtagcacaaaggcggggcggtggggtttatgcatttattaactctaaaggaggcccgaacccttcgttagcacgctgtatatatcaacttaaatttattttacattattttactcgctactgtattgtatattaccaaattttatctgatcaaattgacggtaaagatatgttaacagtaagaaaataaataaagaaacttatcaattgtaagacgatactattaaatacttttgactagaataccgttggatgatttgcattgctgtttatctacagtgtagcgcgtagatatattagtcttacattgtataaataaactaatttgcttaaaattctctaaaatatgtacaaagaaaatgtcttaaaccactgattcaataagttcatctttcaaagtattcttgtctatgcacttacataggtatcttaaagcggtacagattaattataaaattcgcagtaaccttatcaaatattactaaaaaaactgaatattatttaaaataatacatgatcttacggttgaagtgattacgtgaatatacacttaattaaacgaaatacgagccatattcgtgtggcatgacaccacggcgaggataaaaggtatgcgtgagggagtagttcatcagattggtgatattggaggtgtagatgtcagcgaagcggaacagacgtctcgagaagtacgtggggttgtggtacgtacggaacacactaccgaattgtgggttaaacactgcctttatttcattcctgagataatccctctcagccatccactggctgacgacctcgagcgcctcagcatccttgtagtcctggtggtcctctatcagctgcgtcagcatctgcagccagttggcgttctccttgaacgactgggtgttcaatgtgttgatttcatgtgtcaactcgtttatgatggctccagttcgccagccgtgttccaaggtgacgtccgcgaggtcgctgtagggatggtctccgaagtacaacacctggtggccgtaccagcccgtcaggtcttgcagctgcttcactgtaccctcgtaatatataatccctttctctaacgacgtaactttctcccatatatgtgtattggcgttcttgtcgaacactcgaatagggcgcgaaacctccgtgaagaatttcggcttattcgcattcacgatcactacgtcgaagtactcccgccaatcgtggcccaccaacatttccatacctgcatttacaaagtgatagggactatttgttacaaggaacagtttctttccattatcttgcagcatttggaagtatttcctcaagtctgcattgggccttatatactcctccacattctgagcaactattttatgcatgattggatgacagctttgaaccgagttcttgacatctaagaacagaatttccggatgataatcaatatgatttcttatgaaatattcagctacattacatagtaaacccatttctggtactgaaaatagatcagctaaatgcaccatcttggctctgtttggtttatgagccctagtgtctccctcaacataagctatgggtatgattctgtttctgtacaacttgagcacttcatcagtagacacgggagtgagacctcggtagacagctccaaactgtatttgtaagaatgagtccagcttcaggaggaggcctttctcaatatcatagtgcagacctctcacagcaaaattgggtttatactccaattgtaatatttctggtggataattatacttttctaacagaacctctcttccaagattgtacagcaaatgctccagagacggcttgtaatgggccagggtgtaatcatagtcaaatccatatacttttacttcagatagatccagttcattgcaagcaaatacaccccttgggttcacgtcttgtggtagcttcttggatttgaattttaacttcgtacgacagtatgcttcttttaataattcacgcgtagaaaagcttctgcgtaataagtcttctggatatttttttggtaaatgtgatagacagcatttccattttcgtattccatttgttaaattactacgtaaactcattagagacgacatttttagtaacactagacgaaatgtatcacttaaaccttaatcaatacacaaggatccaatattttacgcattaatatcacataaatagattgggtaactgtcagtttttattaataatttaaaatcattgcataataattcgaataaacatcatacaaacaccttgtacgcaaaccatctagtttactacgactgacatgcatgacatctccctgcacagtagatgtcaatgtcaaattgacaaattgatgttgctagtatcacccaat

SEQ ID NO: 295 - DNA, 3456 bp, Spodoptera frugiperda
  misc_feature (1)..(3456): Gene targeted: vATPase; Universal ID: GS1036
catgaacatttccattaattaatctagtataagctaagcttgtgtgtgataacaccagtgttgggtgtaagcaattgtttgtccaggatcatctcaaaactccagaacacacgaacaaatttacacagttttgcattcattgaaaaggtctctggctccgggaggcaaagcaaagaaaattctggaaaaaatcaagagaaaagcaggaatagcagggaagattgttggtagtgaaacggagttatatgtttgagttagtgtgtgcaaatattggcagaatcaagtgcaattttcttattgtgatgtagttatttaatttctatgtctgtgctgaatggtttgcttttaattatggactaaagttattaagtactccacagataacgctggtggtataactggagtgtttcacttaattagaattttattattaaatcaattaccatttgaggacacctacaatgtaatccttgtctatattttaataatgtgcaatatttgtcagcaggtaaagaattaataattcaaaatgagcaaaagcggtttgaagacaatcgctgatgaggacagggaggaaaagttcggattcgtcttcgccgtatccggacccgtcgtaacggcggagaaaatgtccggatcggctatgtacgagttggtgcgtgtcggctaccacgagctggtcggagagatcatccgtcttgagggtgacatggccaccatccaggtatacgaagaaacatcaggtgtaactgtaggtgaccccgtgctgcgtaccggcaagcccctgtccgtagagctgggtcctggtatcctcggctccatctttgacggtatccagcggccactgaaggacatcaacgagctcacacagtccatctacatccccaagggtgtcaacgtaccctgccttggacgtgatgtcacctgggaattcaaccccttgaatgttaaggtcggctcccacatcaccggaggagacttgtacggtatcgtacacgagaacacattggttaagcacaagatgttgatcccacccaaggccaagggtaccgtcacctacgtcgcgccctccggcaactacaaagtcactgacgtagtgttggagacggagttcgacggcgagaaggagaagtacaccatgttgcaagtatggccggtgcgccagccccgccccgtcactgagaagctgcccgccaaccaccccctgctcaccggacagagagtgctcgactctctcttcccttgtgtccagggtggtaccacggccatccccggcgccttcggttgtggcaagactgtcgtctcacaggctctgtccaagtactccaactctgacgtcatcatctacgttggatgcggtgaacgtggtaacgagatgtctgaggtactgcgtgacttccccgagctgacggtggagatcgagggcatgaccgagtccatcatgaagcgtaccgcgctcgtcgccaacacctccaacatgcctgtagccgcccgagaggcttccatctacaccggtatcaccctctccgagtacttccgtgacatgggttacaacgtgtccatgatggctgactccacctctcgttgggccgaggctcttcgtgagatctcaggtcgtctggctgagatgcctgccgactcgggttaccccgcctacctgggagcccgtctggcctcgttctacgagcgtgccggacgtgtgaagtgcctgggtaaccccgacagggagggctccgtgtccatcgtgggcgccgtgtcgccgcccggaggtgacttctccgaccccgtgacggccgccacgctgggtatcgtgcaggtgttctgggggttggacaagaagctcgcgcagcgcaagcacttccccgccatcaactggctcatctcctacagcaagtacatgcgagcgctggatgacttctatgagaagaactaccccgagttcgtgcccctcaggaccaaggtcaaggagatcctgcaggaagaagaggatctctcagaaatcgtgcagctggtcggtaaggcgtcgcttgccgagactgacaaaatcacccttgaggttgccaagctgctcaaagacgacttcttgcaacaaaacagctactcgtcatacgatcgtttctgtccgttctacaagaccgtgggcatgttgaagaacatcatcgcattctacgacatgtcccgacacgccgtcgagtccaccgcgcagtccgacaacaaggtcacctggaacgtcatccgtgacgccatgggcaacgtactctaccagctctcctccatgaagttcaaggaccccgtgaaagaaggcgaggctaagatcaaggcagacttcgaccaactcctggaagacatggcggccgccttccgcaacctcgaggactagacgtcccccggccgcgaccaccgcgccccgcacacgcctgcctctactaacgatggggagacggacactactggcgtggtcgcttaactatatcataggcgacagtgctacgcgagagcgtattgttaatacactaaatagacataaataaatgtgttaaagtctacgtagtgtgaataggtttaattatattattactcgtatttcaatgcagaattcgtaattccaattgttgaaattgaaaggaacgccgcgcgccaggccgccggacaacccgctccatttgtaaatacacgaacaaatgccggcggcccgccgcgccaacgttcgcagttaattagttgttatttatatacagatatatacatactatttatacactaacaatcaattattttatgcccgtttgtacttcgcgtgttaaacaaatcattatatcgagtaccctcttgcattccacgttattattagagtttaatcgaagtaacatgtttttgttgaaaaaaataaaagcaacagtttttttacgcttttcgtgtctcgatatcattgttaccagcattttgatgtaccggaaatgtataagagttcagtattatgtttactttgatagttctcgctgtgttagctagcggcgtcttgtacaaaaatcatgcgctataataacgtatagttacttgctgtttgaacctctgtgaagttacgtgttgaggagacgaaagttataaataaatacaataaagtgtatatattggtgtttcatttccctgttatacgagctaacgataattccttgtagttgcacgctactgggctgtaaatgaaccatcggcctgtgcatcggcatcggtgttattacaatctttgcttacattttctcaaagggggtaaggggataaataaaattacagtgtttactaggatctcgattctggcgtacacaggcctgggccatgtctaatgaatatattttctcgaaattcagttattagaagtaggagtggcttgtcacatcataattcgtacggatcgtaggtaattttttaaataaattatgtatgaatatgaaaaataac

SEQ ID NO: 296 - DNA, 841 bp, Spodoptera frugiperda
  misc_feature (1)..(841): Gene targeted: chitinase; Universal ID: GS1044
gagagcgatactggcgacgttggccgtcctggcggtcgtaacgactgcaattgaagcggacagcaaagcgcgcatagtatgctacttcagcaactgggcggtgtatcgacctggcgtgggtcgctacggcatcgaggacatccctgtggacctctgcactcatatcatctactcttttattggagtcactgaaaagtccaatgaagttcttattattgaccctgagttggacgtagacaagaatggcttcagcaacttcacagctcttcgcaagtcgcaccctgacgtaaagttcaccgtagctgtcggtggctgggccgagggcggatccaaatactcccacatggtcgcacagaaacaaacgcgaatggccttcgtcaggagcgttgttgatttcttgaagaaatacgactttgatggtttggacttggattgggagtaccctggtgctgctgaccgtggtggttccttctccgacaaggatcggttcctcttcctcgtccaggagctcaggagagcattcatcagggagaagagaggctgggaactgaccgctgctgtgccactcgccaactttaggctgatggaaggttaccacgtacctgatctttgccaggagctggatgctatacatgtgatgtcgtacgacctgagaggaaactgggctggatttgctgatgtgcactcgcctttgtataagcgtcctcatgaccagtgggcttatgagaaactgaatgttaacgatggtttagctctctgggaagaaaagggctgtcccagtaacaagttggtggtcggtatcccgttctacggtcgttcgttcactctatcagctggtaac

SEQ ID NO: 297 - DNA, 1158 bp, Plutella xylostella
  misc_feature (1)..(1158): Gene targeted: sd; Universal ID: GS907
ccatggcaagacggaaatctttccaactattcaatagtatcggaggatatctttttcaagttaccaatgattaagcgcgccctgagagcagccacaagcgagataaagatcacagctagcacctggtcaccgccagtttggatgaaaacaaacgaaaggatcacaggctatggacaactgaagccagaattttaccaggcctacgcggattatcacttattattcctggaagaatactcaaaggccgaggtacctatttgggccatcactactactaacgagcccataaatggtgtagctggtgcaccttttgtaagattcaactctctgggatggttcccaagccagttggcccgctgggtgtataataatcttggacctaccatacgccagtcccgatttaacgccacaaaaatcctggccattgacgatcaaagatacatgttacctgtttatatttatgggatggagcaagaagaaccaaaggcttttgattacatagacggcttcgctatccattattacgggaactttgcaccagcatccattctcactgctatccaaaatagctacccggacaaaattctgctgtctacggaagcttgtgaaggtccgatgccctgggacaatgagaaagtcgaaatcggatcgtggcaacgagcgcataactacgtgacgtctatattgcaggacctcaacaactacgttgtgggctggatcgactggaacctctgcctcagcccgactggcggaccgaactgggccgacaacttcgtggatgccccaatcctagtctacgaagactcagacgagttcataaagcagcccatgtactacggaatgggtcatttctctaagtttataccaagagggtcgaggcgcatacggtctgcacagagaagcttgctccgtgttgataatctggcagttatcaccccgcaaggcactgtggtggtggtgctacagaataagagggagagagctattgatttacgcattcaaattgattggagaagattaatcagcatcactttagaaccacaatctatcaagactattgaaattggagtgtaagagtaaatcttaataaaaataattggaactagcttttgatgttttattgtacaacaataaagtatattaataaataaaaaaaaa

SEQ ID NO: 298 - DNA, 1793 bp, Plutella xylostella
  misc_feature (1)..(1793): Gene targeted: Rpb7; Universal ID: GS910
ctgcatgttcatctgcatcagctccttctcgtgggccagttggagggtgtgcagctggcagggtagaaaagaaagccgcagccttacgatgcgcgtgcgcaacgcatgcaccgcgggccgtccgaagctgcgcaggagtgtccgtcgtggtcattcgcgatggaaccgtggaggacgctgctcgtgctggccgtggccgccgccgccgccgccaccccgctcattgaccaacttgcgcctggacaggaaaggcccgctcgttcgtccgttggtcagccgggagattcaacaaaagaagaaatcaaagttgaggacgtcttctctggatcgacaaatgagactgcagtggaagaagtggatgaagaggcattcgctaaagccgtaataacgaaagaagtagatctgacaaaggatgaaatcactaaagttgactacagcggggcccaagtctggaagatacaaacaaacaaacgaagcgtagtggctgttgtaggcagattgagacgaagaaacctcgtgtcaacatggggcggaaatcatacgcacatggatatacttgttaaacctaacgcggtcaaaaatgttacaagagctttcaagcgggagaacatcacatacgatgtcctaattgaagatttacagagacgaatcgatgaagaaaacccgccattggatgagaatgaattgtcccttcaagacagacgaggtcataaaatgacgtggaagcaataccacaggctggaagacattcatcaattcatggactacttggcgaaaacatacccatctatcataagcgtaaacagcattgggaaatcccacgaagggagagatttaaaggttttacgcatatcggatggtaagccaactaataaagccgtgtggatagatggaggtattcacgccagagaatggataagtcctgccactgtcacttatttcatcaaccagttcgccgaaaacttcgatgttgagtctgatgacgtcaagaacatcgattggtacattttgccagtagttaaccctgacggctatgagttcactcatctcggcgatcgtctatggaggaagaacagaaaaccacagggcaccacaagggtgtgttttggcgctgatctcaacagaaactttggataccgatggggcggcaagggttcttcaaacaacccgtgcagcgatatttaccgcggatcaagagctttctcagaaccggaaaccaaagctgtgtctgatttcatcaacaacagtgcagtaaatttcacagcatatttgacataccatagttacgggcaatacatcttgtacccatggggatatgactcagtggtgcctcctgattaccagcagctagatattgttggaaaggatgttgctagggccatacaacaaacaggaggctctgaatacagtgtagggtcttccagtggcttactgtaccctgccgctggtggctccgacgactgggccaaggctaagggcatcaagtacacctacaccatagagctcagtgacacgggaagatatggcttcattctccccgtgtcatacatagagcctgtggctagggagtctctagcaggcctcagggttttagctgctgccgttaataaggcataggttgggataagattgcgtgccattaatttatttgatatatttatttatgtttatattatgtgatgttttcaaattcggatttttatagtgcctgtgtctaaattcataaaattaagtacaaacatattgtaaggtacacagttgtcctactttattatgccttttgcagattagtc

SEQ ID NO: 299 - DNA, 1564 bp, Plutella xylostella
  misc_feature (1)..(1564): Gene targeted: calypso; Universal ID: GS914
gattcccccaccccacttctctacccctcctattcatggcattgttgttttttgcattgtttgaattcaaacaaaaaagtaataaaatctaataattacggcctttcttctatgaaaaacatgccggtggaactcaacagcttaactgaaggctggttggaacttgaaagtgatcctggtttgtttactttgctactggaagacttcggtgtgaagggagtgcaggtggaagaaatatatgatctgcacaagccactggagagtccggtgtacgggttcatcttcctgttccgctggatcgaggagcggcgctcgcggcgcaagttcgtggagcagatcgagagcttcgtccgcgatgaggagaccatcaacaacatattcttcgcccaacaaatggttccgaacagttgcgcgacgcacgctcttctttcaattttattaaactgccccaatttgcatttaggtgaaacgctgagcaggctaaagcatcatacacttggaatgaatccagagaacaaaggatgggcaataggaaacacaccagagctcgcatgtgcacacaattctcatgctatcccacaagccaggaagaagactgataaaaatgctggagtatccacaggccgtttcacaggagaagcatatcactttgtgagttttgtgccaataaatggtcacttatttgagctggatgggttgaagccatttcccacagaccatgggccatgggcggtggacgaggactggacagagaagttcagacgggtgatgtctgagagacttggcagagatgccggtgaacaagtacatgacatcagattcaatctaatggcagttgtacctgatagaagaattgcattcacaaaaaccctgggatctctggagctgaatcagaaaagagtgaaggaagcattatccaaaataagcaaacattttagacatattcattcaaagggaattcaatacaatgagcaaggtgaattgatatccacgcatggagaggagtcaatgattgaggatatagatgagcagatcagtgaagacaccatcatctcggcgctggaagcctcggaggtgcacacatttgaagtggacttcactgtaccaatggctatcgagattggcaccacggatcaggagcaacaagatagtcgaattgttcttgtgagtccagtcgatcaaggagctacagtaaaatttgtcacaatagacagagacagccaaatactcgaaaacatctacccaacttcaacaacagctctgataagaagcaatgattctcctattctagtctacagagaaataactgaggatcagcctatgaaactttcaaagctgtttttcactcaggcagaactaaacgcactgctgagcaaagtcaacaaggaaatacagtcgtgtcagcaggctctcaatgatgaaaatgataaacgagatatgtataaggtggacgactgccggcgcacgcacaactacgacgagttcatctgcgcgttcctctcgatgctggcggagcgaggggcgctgggcgagctggtgggcgcgcagctggaccgcggccgcg

SEQ ID NO: 300 - DNA, 1255 bp, Plutella xylostella
  misc_feature (1)..(1255): Gene targeted: Rbm24; Universal ID: GS913
ccctaccactaaccacgacacacgctaagctgtccccaacagtgtttacaaacccatcgcgcgttttgttcagcgtcagctgagctctagtgataccaggtgacagtggccgtcgcgacggagaccgttcaaggcatgctgatggccggcgcgcagctggccgagcccgagggcctgctggccctgggggctctccccggccagaaggacaccacatggaccaagctgttcgtcgggggcctgccctaccacaccacggacaagagcctgcgggaacacttcgccgtgtacggcgacatcgaggaggcggtcgtcatcacagacagacagaccagcaaaagccggggatatggatttgtaataatgggtgaccgggcggcggcggagcgagcctgtaaggaccccaaccccatcatcgacggccggaaggccaacgtgaacctcgccatcctcggagccaagccacgggggaacctcacgccagggttcaacttggcggcggccgcgggggtgcgggcggggtaccccaccgtgctacagtcgccatacggatgaggcgagcggcgcggcccgggaccctgctgcggactgcaactagactaagattaccaaacattttcacataggtatctatggcaagcgtgagcgtgagagtggattttttcgttttgggtgtgaattagtcgattgggttgttttactgtttccgttttgttgaagctatgtgcgttgtgcggcatgggcggcgccgcccgcccgcgccgctcatcgccgccctaccagtacgcatcgttatcgacactctatgttttctttattttatgtttaatgccgtgttcgtgtaagattttgttgatttgagttttgttggtggtggatttcgtttaatacacttatattatttataagagagttgtgatgttgggcctcggcgcgggggcggtcgagcgcgcgcggtgtgtgcgtagagtggcgcgcgctcgaccccgccggcccacagcttaaacattgacagctccactgtgccccgacaaactcccaccgacagtcatagccggttcacatccttgtggccatcccgtgggtgttgatatttaagctgtgtctgcactgagacgtggcccgcgagcccgcgccgcccgcccgccccacacacatcagtataattactcacattgggcgacaaccaaatcaattattcatcttaatcttcattctttacagacaaatggccatgtaaaagcttatccattaa

SEQ ID NO: 301 - DNA, 867 bp, Plutella xylostella
  misc_feature (1)..(867): Gene targeted: twisted bristles roughened eye; Universal ID: GS909
aacaaaatgtatagagctctgcggagagttactcacctggtttttagaaatttgtcatgtttgccatcgatgacattgcaacgcatccctgacgtggttcctcggcgagtgtctgaatttttgagacgggatcgaaaataaatcaaaccaccaacaagccaaccataaaacccaatatttaactataccccataaaatagactaaccaaataattatacaagatgttggacagcttgtttgacgatgtgaaacgcatgaacaagcggcagtttatctaccaagtgttgagctttggtatgatagtgtcctctgcgctgatgatatggaagggtctaatggttgtgactggcagcgagagtcccatagtggtggtgttgtctggcagtatggagcccgcgttccaccgcggagatctcttgttcctgacgaactacccggaggagccggtgcgcgtgggggagatcgtcgtgttcaaggtcgaggggcgggacattcccattgtacacagagttttaaaacttcatgaaaagaacaatggcacagtaaagttcttgactaaaggagacaacaatagtgtggatgaccggggtctgtacgcccaggggcagctctggctgaccaagaaggatgttgtgggccgggcacggggcttcctaccatacgttggcatggtcacaatatacatgaatgaatatcctaaatttaagtttgctgtgctggcttgtttagcaatctacgtgctagtacacagagaatgaagagcaaacagtttgtatgatttataaatggaggaatatcatcagtgccggatgtaatggtttttatttaattctgaataaaaaagttctctctagtgttataaatgg

SEQ ID NO: 302 - DNA, 1229 bp, Plutella xylostella
  misc_feature (1)..(1229): Gene targeted: surfeit 4; Universal ID: GS912
tgaaagatcttccaaagaaaaagcggctgtatcgagagtgaaactgaaatttatttttggtgctagtggttgtgatacagcaattcaaaaatgcaaataccgaatgaatatgtgtctacggcagaagatatagcagatcaggttattcgaaaaggcaaaaacatattgccaacagtagcacggctctgcctcatctccacattcctggaagatggcctccggatgtggttccagtggtctgagcagagggactacatggacatgtcgtggggctgcgggaagatccttgccacattatttgttatagtgaatctgtttgggcagctgggcggctgcgtgatggtgctgggcaggctgaaggtggacatcgcgtgtggggtgctcttcttcattgtcgtgctacagacgttcgcgtacagcatactctgggacctgcagttcctgctgcgcaacctggcgctgatcggggcgctgctcctagtcctagccgaggcgcgcgcggagggacgcagcctgttcgccggcgtgccctcgctcggggagaacaagcccaagacctacctgcagctggccggcaggatattgttagccttcatgtttgtcacgctgctgcggtttgaggtgtccttcttgcagatagtgcaagacatcctgggcagcgcgctcatggtcctcgtcaccgtcgggtaccgcaccaagctgtcggcgctgatgctggtgctggtgctgagcgtgctcaacttgtaccacaacgcgtggtggctcgtgcccacctacaagccgttgagggacttcttgaagtatgacttcttccagacgttatcagtgatcggcggtctgctgatgatcgtgtctctgggtccgggcggcgtcagcatggacgagcacaagaagaagtggtaatcagacgaggataggctacgaggggcgcggtggctcgcgcagacgcctggagtgtatcgggaagtcattttgacgaacgaacgcagtgattgacattgaaatcaatccgttcgtttgttcgtcaaattgttttcgcggtagactagctgtacagtcaacacttgggagacaggcagcggaattaataattgctcaaatatgttgtgaaggtttacccttttttataagcaatcgatttatggaatacttttacacgtgtcatgttgtaagggtaagattctgactgtcgttttcaagtgtgaaataatcatggaatggagaaggaa

SEQ ID NO: 303 - DNA, 1340 bp, Plutella xylostella
  misc_feature (1)..(1340): Gene targeted: Rpn7; Universal ID: GS915
ccagagctaaaggacgaccctcaactaaaagaacagctattcaaaggcatcaaggatgggaacatggcaccttactacaaggaggtttgcactgatcttgggtggcaatttgaccaaagattgtttgatgaaatggctaacgaaaaccaggacagattatccaaattcaaagaagatgactcagaaacaccagtgtggcaggacagacttgactacctgtgttctattggcgacaaggaagcagcaactgccctagctacgtctaaatacgaggataccaccctgaccaccaacaggaggctggacgccatgtttgcattgttcaggatcgcctacttccatggatgtaatgtgaaggaaatgggaaaatgtgtcacaaaagcacatgagctggttgacaagggtggcgactggaggtcccgcaacaagctcaaggcgtatgaggccatctactgcctggcggtcagagactacaaccgggctgctgaactctttattgactgcgtctccaccttcgaatcttatgaattggttgactttggcacaataatccagtactgcgtgctggcgtgcgcgctggcgctggagcggcacgcgctgcaggcggcgctgcggcggcagggcgcggccgtgcaggcgctgcgctcgcgcttccccgagctgcgcgagctggtggagtcgctgcacgagtgccggtatgcggacttcatgaagagtctcgcttgggtggagacccaaatctgcgtggaccccgtgttccgcccccactaccagcactacgtgcgcgaggcgcgcatcaaggcgtacgtgcagctgctgcgcgcctaccgctcgctcagcctcgacaacatcgccgacactttcggggttacccgcgagtttgttgaggacgagattgctgtgttcacagccgcaggtcggctgcagtgccgcatcgacgcggtgggcggctgcgtggtgacgggctcgggccgcggcgctgacgccgaccgctcgcagctctaccaggccactatccgcgagggcgacctgttgctcaacagggtcaagaagctggccagtgtcatcaacttctagattctctgtggtacactcgatttctttttttttgtggttagtttttgtgcgtttgaattacgaacgcgttcggtgcggtttttgaaattgattttgtacgatgaaggatttgaacctgcgttttggatgtcggtttctcggtcgcttctttgttaaatcgctttataaaaactataagacgtgatgtagaactaagataattaattataaatacctaatagaataaaattaataatagtctatagaaacttgagtgtactgta

SEQ ID NO: 304 - DNA, 2414 bp, Plutella xylostella
  misc_feature (1)..(2414): Gene targeted: how; Universal ID: GS911
cgctatgttcgcccacaacttcacttcgataaacttcgtcatttagtggtgatcgaaacatcgatgtgtgtggaagtgaggtgtaacttttctaacatttctcacaaaatttacaataaccagtaaccaaaagtaatatttcttattcgaacgtgttggcataaactttttcacgtgacacgagttttagaaacattagtcaaaatgtgtgatactaataatccttcgacacaaagtatagcggactacttagctcagttgctcaaagacaggaagcaactggccgcgttcccgaatgttttcatgcacatggagcgactgctggatgaagaaatagcaaaagtgcgagcgagtttattccaaataaatggcgtcaaaaaagaaccgctggtgttaccagaagcagaaggcatggtcaccacactcacagaaaaagtctacgtacctgtaaaagagcatccagatttcaacttcgtgggaagaattctcggcccccgaggcatgacagctaaacagctggaacaagaaacaggatgcaaaatcatggtcagaggaaaaggatccatgagagacaagaaaaaggaggacgccaacagaggcaagccgaactgggagcatctagcggacgatctgcacgtcttgctcacagtcgaagacacagagaaccgcgccaaggtgaaactggcgcgggctgtcgatgaagtgaagcgtctgcttataccccaagcggacggcgaagatgagctgaagaagcgtcagctgatggagctggccatcatcaacggcacctaccgtgactccagcgccaaggccgtgcccgtcaacgtggaatccgcagccgacgaagagtggaggcggctggctgcctcggccgccgcggaaacccagcggcttctgaaccccggcggaggggtcactctgaggacgcaagcacccttgggggctcccctgatcctctcaccgaggatgtcgggacaagcgcagggtctgctcaacgggtcttctggcactgggctcctgtctccgggcgagccggcccaccagctcatctacgctccgcagtacgctgactacgctaactacgctgcgctgacggccgccgccaacccgctgctgaccgctgagtacgccgccgccgaccatacgggtgtggtgcggagggctgccggtcgcttaacgcaagtgagggaacacccttaccagcgcacggccttgccagcgccctaagcccgccgaaatacccttactgccgccattttgttcacaaggtgagtgctaacgacgaggaggaactaacaggagtcgcggccgcccacgatctcgaccaatcctggccaatcctggccaaacccagccaacctcggccaaccttggccaaagccgccgcgtaacactctcatcggaacatcgaccacatgtagctatatcgctgttgggcctttcacgttaacaactactatgtattataatagtctaactattaacatttatttgcctgttatgtttataacaagatgaacttatatcattaaccatatttttctctaaatggcacacgccatcgactatactatttacatttttgttactttactgtttgttgttgctttgtcgtattgttgcgtgtctactgttcgacgcaagtggttgttaggttacccgaaattccttttttagctttgtatagggattatattaataaactatatttaattattttgtagacaatattatgtcggtcatttataattaaataatgatctgaaaaagttcaaacaaatccctgtacaaaacttattattatgaaatgataaagaacttaccaactttttggtactgcaatcagcctatctaacacttttttcaaataaagagaaatagggttctagaacttgaaaaaacaaatcagtttcaaatttcaaagttgactttttagttgtttttcaattcaatttaactcttgatgttaaagttactaagtatttagtaattacttacttatttcaaaatatatttttcttttttgaaaggcatagtgatataatgaatatactattaaattatttaaatcagtgaaaatatttattatgaaagcagcattgtcatcatggcggcaagaacaccagtaagtaagtatagtttacaaaaaatgatgcgaaaataaaacgaaaaagtttttttatataaattataaataatcaagttagactgatattggagttaatagtctaatcttaagttttgttctcatatacttattgaccccccaatctttggcaataatgaaatgttatacgtgattaaccaaagactatgttaaatcattcgagagctaatcaaattatgaactgttatcgtaaaatttgtcttccgtgatatttaaaacggtcaatgagtatatgatattttctaga

SEQ ID NO: 305 - DNA, 1780 bp, Plutella xylostella
  misc_feature (1)..(1780): Gene targeted: Phenylalanyl-tRNA synthetase beta subunit; Universal ID: GS916
cataaatttacgcatgacatctatgtgacagcttcatttatttttgtgaaaattgccgtgttttttttggaagtcaaccgttgacgacgtggtcttgaggtttttacacaataatatcatcatcactccaccatataacagtgtttatctaccaaagtcatcatgggagtctggcaggaggtggcaaccgccaaatcagagaaccggcatgagatcaagctcgctggagccgcaatatccaagcggatttctgaagagggcttggacaagagtgtcttccagctgacgagcatcaatctgttgaacatcagcgacacatgtctaacagccattccagatgagatcaagcagctggtcaacctacaatcactacttttgttcgggaacaagatacaagaattcaatgaaaacataacctctctacccaagttgaaggtgctagatttgtccaggaatcagctgaaaagtgttccggagagcctgaacaaaatgaaggagttgaccagcataaatttaagctcgaatgagattgaaagcatgccaaagtttgttgattttcctaatctaatcatagttgatatatcaaacaataaattatcaagcttcctggatttagaaggtgctgtgttccctcacctaacagacttgaagctcaaagggaatgtgatagagtctctgcccggctgtgtggccagcagtctgccgtcactcaagaactttgatatcggagacaaccagttgaagactgttcctggagaacttgcagctatgtccaaattaaaagaactcaacctaaaaggcaacaaattggccgacaagcggctcatgaaactcgtggaccaatgtcggaccaagcaggtgcttgactacgtcagagaacactgccccaagtctgaccagaacccgacagcaggtggaggtggcaagaagggcaaaaaaggacaggccaaaaaacaagaagagcctactgaagaagaagtcagtgacctctgccacctactgaagatcctccatgttgaagatgagagcataaaagtaaagatcaaagagccaaacctagcgggcatccggccgtacatcttgtgctgcattgtgaaggacctgaagtttgacgacgtgatgttcaagaagttcatccaactgcagaccaagctccatgacacagtgtgtgataagaggaatgtggccaccatcgccactcatgacttgagcaaaattgctataggtgacctagtctacacagcgaagcccccggcgcggctcaagctggtcccgctgtcgcggctgaagccgtgcaccggcgagcagctgttccagcagctcacggccgaggcggaggcgctcaggaaggagaagaagaggaacgtgtactccgggattcacaaatacctgtacctgctggagggcaagccgcgctacccgtgcctcgaggacgccagcgggaaggtcatcagtttcccgcccatcaccaactcagatgataccaagatgtcgccggacaccactgccatgctggtggaggtgacgtcgcacgcgtcgctcggcgcctgcaagaccgtgctggacaagctgctgcacgagctgctgctgctcggagctggggctggtgatgatggagagtataacacgctgactgtacagcaggtgaaagtggtggaccctgaaggtaacctgaaggcggtgtacccgtcccggaccgactgcgtattcgagggagaggcgaacgtcaaggtgctgcgaatgccgaagaaataaacccgaccaaccacaaataagcgag

SEQ ID NO: 306 - DNA, 974 bp, Plutella xylostella
  misc_feature (1)..(974): Gene targeted: twi; Universal ID: GS908
ccgccgccgccgccgccgccgccgccgcctggccgcacatcaacaccgtgttcgacaacgaggagagggagttccacccgcagcagtacccgcactacgaccagcagtaccccgccgaccgagccaggtcggacaagcagttctacttcgacgactccaactctcaggaccaggccagcagcttctacggctcccccgagggcgcgaaggacggagtgtaccgcgcctccacggaggaacgcagcgacgagaacgacgaacaaaggagccgctcgcggaaacgatcctccaaagccgcgagaaagaaagcgcagtcgttcgaagagatgcagatacagcgggtcatggccaacgtcagagagagacagcggacgcagagtttgaacgaggcgttcgccagcttacggcaaatcattccgtctttacccagcgacaagctgtccaagattcagaccctgcaattggctacgcagtacatagagtttttgtaccagatactgtcgaatagcgagacgtccagcaatgatggcagtgaggcgagcagcgaccacggcaagtacctcgctcaggacaagctgagctatgcattctctgtgtggagaatggagggagagtggaccaacggacagacgtgagcttccaaaccaaaatataggtttaatacttggtgaatccagttgaagacgcttagctattccatttccgattgttgattattttgtaaagacactacaaacatgacaatgttgtttaaattgtgataggtagttttaagggtaaaagttaatgccaaatgtttattgtaagtgtaaataattttaatcaagtgatatgtatagaatagacactcgctgagaccaaagtagtaacttgttatttaaatgccaatgtttaaatgaattacaattgtaagtacttaataactgatcttcttttgatatttttatgcaggtactgtaatacctgcactaatg

SEQ ID NO: 307 - DNA, 2986 bp, Plutella xylostella
  misc_feature (1)..(2986): Gene targeted: mbc; Universal ID: GS983
gtggacactgtgttgcagcttataggcgggagggagccctgcaagggtcccatggtggctggtctgctcgggctgatggagctgctgaagccggcgcactaccagcggctgtgggggcacctggcgccgccgcctgaaaggaaaccgctgaaggacttcctcatgagggccttcctagtgttccggcatctcattgagcaggacgtgtttccatctgactggatggtacttcgcgttgcgagctgcaaggtcctcctgaccgccatgcaagacctcgccaagcctttactggagagattcctgggagatgaacccccgcaatttgatacacagctatggtccggctacatcgagctcggcgtgtctctagtcacgtgctctgccctacaaccggagcgctgggcgggcggcgggccggaccgccctcgcatgcgcgcggccgctgccctgcagttactggctgtttggagccgcctaggcccagcccaactccacctgatcccaggcgcagtgggtgcattactcgagatcaccctagttagttccctccgccgcgccgccctcggagcgctagtatcgctaatggcggctgaacgggcggccagtggctcggctcgaagaaccgaagcagctttagtggacaaattggactctctggtagctgacaataaggccgacgatcattatcggaggctttttgatactgtgctaatggagcgagtatccacggagggctggcgcgaagccggtgccgcgtttgtgggctgcgtcactcgactactggagagattgctggactaccgagccgtgatgcagggagcagagcacagggacaagaggatggctgctacggttaacttgttgagtttctacaaaaacgagatagatcgcaaggagatgtacctgcgctacgtttacaagcttcacgatctccacatcgcgtccgacaactttgtggaagctggctgcacgctgttgctatacgccgagacgctgagctgggacagcgacgcggtgggcgtggaccccgagcacccggacacgccggagtggaggcgcaaggaggccatctacaaccaggtgctgcagtacttcgaccggggcaagtgctgggagaaaggcctacccctactccgcgaactcgccactctctacgaggtccgtctctgcgactacgtgcggctcgcccactgtctccgcacgcacgccacgttcctggactcggccctgacgccggagctgaggcccgagcccgagtacttccgcgtcgggttctacggcaaggcgtgcccgctgtttgtgaggaacaagcagttcgtgtaccgaggctacgactacgagcgtataggcgcgttcacacagcgccttcagactcagtacccctccgcgcacatactgatgcggaatacaccccctgatgatacggttgtgcaggctgatacgcagtatatacaaatatgcaacgtgaagccggtgccagcccgccgcaactggcccgccgccgcgcccgaacaagtgaagcggttctacgcatgcaacgatgtggatacgttcctgtgtgaccggccactgcacaagccgcctattgacaaggataatgagtttaagagtctctggatagagaggaccacgctggtgactgagaacacgttaccgggcatcctgaggtggtctgaagtgatctcgcgcagtgtcgaggaactcactccggttgagttcgcgtgcgaaacaatagaatcgacggagcgcgagctgcgccacctcatatcgcagtacacggccgcgcccgcgcgcaacatcaaccccttctccatgcggctgcagggcaccatcgacgccaacgtgcagggcggcgtcaccaagtatcaacaggcattcctcacgcccgagttcacgcactcagcgagcccgtgcgaggcggcggcggcggcgcgtctgcggcgcctcgtgacgtcacagctggcggtcgtggacgcgggcttacagctgcacggccgcctcgcgccggacgaggtcaagccgctgcacaggcgactggtggagagattcaaccagctgcgtcagaacctgggtcctgggctgaacacggcgccgccgctcggccgcaccaggcggcagctgtctgagagtatcgtcaatactccactgccacccgtaccagggaatgagaaacgctcccagagcatccagcaaagtgacagttactatgatgaaggacatctctacaacaagccaatatactcaatagacgactcgatcgacgcacaaagcagcctcatgtcgcacagcttacctctaaacagctgtacccgagacagctcgtgcgacgacgtgagctgcatgagccagtccgcgccgccgctgccgtcgcggcccagccagccgcgcagccccaccaagccgaagcttaacaaccgggactccatagacagcgaggtggagacgcgccgccacagccgcgcctcgtggagcgagccgggcgacgcgccgccgttgccgcccagagtttcaggcgacaagcgctcctggtccgaagccccgccggccgtcccgcggcgcagccacaagcagtcggcctcgcctcactcggagcggctgcgggagagcgaggccagggactccggcgtgagcgtcgacgcgcacgcctacagcaacgccgacgaccatcgacaccacgacatggacctaaccgtggactctctccgctacgacgagatcatctccatgatgtcgtcaccgctgcgagtggacgaggcggagacgccgccgcccatcccgcccaagggcctcggacacctcagcagcttcgactcgggccatcacgagaacggagacactaactgctaagtcttaggtggaatttcaccaaacgctaaacgtattgcctcacctatctcctgtcaaacgtctgtcagttagtacaaaatgtatttaaaatatgatttaaatactattttaaatacgtttagcgtttggtaaaagtctc

SEQ ID NO: 308 - DNA, 4993 bp, Plutella xylostella
  misc_feature (1)..(4993): Gene targeted: psc - posterior sex combs; Universal ID: GS899
gtaggcactctctatgtagcgttttagtgtagtttttcatgtattattcgctattatttttgtgacctgcgactgaaatttgcagaattgacggtaagagtttaaacaattttatcaactccttaatattacctgtgtataaggcaatattcgggttaataatttctgacattattgttcttggcagggttgccaacctcacggacggtctgttgtgttgagtcgccaccgccatttgatttgttgcgacttctaattcaataaaaatgcgataatttataagtttaaacgaaattattcaatgttctaagtgtttacttatcgttgtgtatttaatgtgtgaagtgaacatataatttggttactcgccgaaagtatgaatgtgctttacgaaaccaaacatctgccttgacagctgctgatgaacctatttttataacactggacatgagtttgtaacgatggttacttccaataaattagccgataaaaaggtggttaaaatgggtgaagacaacaatgtggatgttgtgccccagcgaacgctattgggcgaagtgaacgagcacattacatgtccgctttgtcgtggctactacatcgacgcgaccactattgttgagtgtttacattcgttctgccgcagctgcattatcaaacaccttcaagttaaaagttactgccctgagtgtgaaatgatgataaattcagcaagacctcacataaaacctgacaaagcactgcaagatattgtttacaagttagtccctggattattccaaagagagatggagcgaaggcaacagttctatgcttcccgccctgggccagctgcatcagctacgccggagcagcgaggcgaggacacagagagaattatctttagtcctgaagatgtgatatcattttcattagaatttgcagatgctactgacgctgacagcatatcaagtaaatcatcagacagcaatgaaccacaatctcaagcaggtactacaagaagatttttgcaatgtcctgctgtagttaacatcagccatttaaaaaagtttatcagtatgaaatttgacatagacattactcagttttcgattgatatcctgtataaaagagtaccgctgcctgattattacactttaatggatatagcctatatctataattggaaaagaaatgaacctatgagattcttttaccagattacagactttattgctataaggacaagatatggcttatttgacatcaatagaaaaggggctcaatttcgcaagccaagtccgacaccaactgaggatactaatgctagcagtccggcacctaatgcaaatgaaccaggatctgaagcatcttctggtacagacagtcctatgcttgaggaaagtaatatgaaaaaggtaacagaaaatgttaaaaaagatgataatcaagaatctggtaaaaaagagggcttggaaccagcacctagtggcagtctcaagaataaaaatgatacaccatctaagaagcctgatgaagatgttgagaaatcacaatttcttaactcatttgaattaaaagcaaaaagcagttttggtacagttaagccactttccatcaaattgagcagagatagtattaagttagcatctgataagagtaataaagagactccatcaattaactctacaaacaacaccccaaagaatgatgagtccttgaaacgaaagcaacatacacctcctacttctcctgaagtaaagaaagttaaaattgatatggataaaatcaaaacacctactccagtatctcaaagccagattccagttcagggtggatctacaacaaaaacacaaatgcccaagaagtcagaagtacaagagaagaaaaaagatgtaacatctccaagattggtacaaccagttgtgccaccaaatctaacaccagcaccaactccttctaaagaagttaaacaaagtctctcaatgccaaatcaaaatacatcagaaatgactccaataaaaaaacccacaccaacacctcaccacatgtcttcaccgaaacaaaaggttggtgatagtccatcactaccagctgcaccaaaaactgtatcacccttgaaattgcaacttcctaagacaggttcaagcacagttaaacctaaattaatggatccaccaaaacatactacaaagaagatgcctgatttgaagccaagtgtaccacccctactgggtgttcagaacaaaagtcaaactgtaggaaaagtgagaatggatctgttggctaataacagtgatcctacaatagataggagcaaaatattgtcacaagtcaaatcatctctcggaaatcagaacccaggtcaatcatcaggagaacaattgaagtctctgtttgactcatgtaaaataaatataccttcatcattatcaatcacattaactgaccaaaaagaccaaagaaatcaaaatgaaaccacagctgttgaacctaaaaaacctgttctcaataaaaacttgtctgtagctggtaacaataatgctactgcacataaggtaccaagccctcccgtccataattatattgaaatattaaaattacctgataatgatcccaagaaatcaggtgctaaaatagaaaatgtccctcaaaataaacctgcaattcctaaaaatgacacttctggtacaccagggaagcctaaatcatcagagtcttcagctaaaggaccaatccctagtttgaaaccaattgcagatacaaaattaggcaaacaaagcggaacaggttcaggagtcacatttcaacaaacctttgagaaacaaattatgtcaattcagtcagacaagactaaattacctaaaaataaaatgcaagttcccaagttaatgccagccactcctaaagcattgagtgctgcaaataaattgaataataaacctgtgacacctggtatatccactcctgataacaaaacaaccataaggaatgacaatgctcttgatttgtctactccacataatcttcacagtcaaatggggcctcaacaaacaaaagcttttgaaaccatgcaagtcatagccaacttggccaagaaacaaaatttatccagtaagcctatgccaccactgtcacagaatagtatgttttctggtatgcaaaacaggcaggttcctggtgcatcatctatgcctttaagaattccatctatcccaagtagtaatacacaccaaacaaaacctgataaaataaatgtgccgagcacagctcaagtaaatactgtaagacaagatgtacctaagttgaatccaagcaaaccatcgccaagtggttcaaacccaagcactccctcgccaaattattcaatatctcacagctcgcccagtaacaatgtagcccagccctcccctcggcctcagacccgctcacctagttcttcaccaaaattgataattgcagaggataaacaaactacttcttcagagctaaatattaatcagtcaaatcaaataactagcactcagattcctaatacaagtgctacaaaaacggaacagccaaagtcatcacctggcccatctaagcaaattatgaaacctgttaaatccttaatgcaaaataaaatgcctgcagctaggcagcctatgatgatgggtactcctgcagaaattcaaatgattcagcacgccgcgttcctaaggcaaatggaaatacaaaatgcatggttcaaagaacaacaaagattgatgtcgcagtccaataataaaaataataaacagtagatattccttcaaaccaaaatccgaaaaatatatattttctgtatttttgtactgttttgtttgaaatctaggtgtgattgatatgtttttttatataatcaaatataatataagtatttattgttaatatctttatcagttcaagatctttgtttgttttttatggtttaattttgagttatgaaatcatgagtaatttaaaacttagggtcagtttttgtaggttgtaagcatgtgtgatgaattgatgatgtgtgacttgactttattttgtatagttggttaagttggtttagaaattatttgttgtatattttattatgttatgtaacgaaacattatgattatgaacttaattatgaattatgacttaaataatgtttcgcactttatgataaatctcatgtaatttgttctaaaatctttgtatcattcgaagcattcccttttaaaatttaacaattaatttaagtcagtctttagacttatttttacaaatgtgtatacatttaaaggataaaattattgtctaaatttaaaacctataatgtaccttacctaactagataccgccacgtactacccatccatgcagttgatgtaaaactctacataacttatctacctatatcaaattccacgggcaagacatctgataccaacaaaaactacccttattcgaatatgttaagggttctgtcagatgtctttacccgtggtatgggatatacgtacgtagcgtaacttacatttaccgaggttttctgtacattttgtcaagggtcgaggaagatattacattttaactgcatttatggcgactgtacctccctatttctttctaagaatggattcagagtatttttatttattaacgactataacgacgaaattcactatcgagtgttttctgcttattaagaacttatgttgcgcaattccttagctatatagcgatagtgctttagttgatgatttttaaataattttgaacataattttatacaacaatggcaaaaattgttacaatgtatgttaggcttaggtttgatattttataagtaaatataactttagtgcatcaaataataatgtcctaagggtatatttattgagattaggtgctaacctaatcaaataccagctaaatatataattttaattacctaattataaaagtacacaattatgtacagtaggtatgggtttgataaaataaatgtataatt

SEQ ID NO: 309 - DNA, 2086 bp, Plutella xylostella
  misc_feature (1)..(2086): Gene targeted: Upf1; Universal ID: GS900
tagccatgtgtggtaacatggcgaattttcgtcatctttccttgcaagtcgtttgttaattattgcgtggctgttatgggaattttcttggacagtgcaaaatttctattttttgatatattttcattcgtttgctcactataatttcaactctttagaatgagcgtcgacgcttacggaccgagctcccaaaccctcacgtttcttgatactgaagaagctgatcttatcggagctgatacccagggctcggagtttgagtttaccgacttcacgctcccgtcccagagccaaacacaggcctcgcagcacgaccatggcctgtcgactatcaaccaggtgaacggggtggggcgtctggacctgacggcgaagttgtcgagcaccaccaatgccatagcggagcttcagttcgaggaggaagatgaggctctgtacagcaacaaggagctgccggagcacgcgtgcaagtactgcggcatccacgaccccgccaccgtcgtcatgtgcaacatctgtaacaagtggttctgcaatggccgcgggaacacgtcaggctcgcacatcatcaaccacctggtccgtgctaagcacaaggaggccgccctgcaccgcgacggcccgctcggggagaccctactggaatgctactcctgcggggcccgcaacgtgtttgtgctgggattcatacccgctaaggctgactccgttgttgttctgctgtgccgtcaaccatgtgcggcgcagagttcactgaaggacatgaactgggatcaggaacaatggaagcctttgatatccgaccgtgctttcctctcctggttggtgaaggtgccatcggaagctgagcaaatgagggctcgtcaggtgaccccgcagcagatcgggcggctcgaggagctgtggcgcgacaacgtggacgccacgttccaggacctggagcgccccggcgtggacgaggagccgcaccaggtgctgttgagatacgaggacggctaccaataccagaacatcttcggccctctcgtcaaactagaagcggattatgacaagcgtctcaaagagtcccagacccaagagggtattgaagtgcgctgggacgtgggcctgaacaagaagaccatagcttacttcactcttgcgaagactgatggtgatatgaagcttatgcatggggacgagctgagactgagatacgtgggagaactccacaaggcgtggtcgggcgtgggccacgtgatcaaggtgccggacaacttcggcgacgacgtggggctcgagctgaagagcggggccggcgcgccgcaggacgccaccaccaactatgtggtcgactttatatggaagagcacgagttttgatagaatgcaactagccctccgcaagttcgcggtagacgactcctccgtatccggctacatctaccggcggctgctcggccacgaggtcgacgacctgctgttccgcgtgcacctgcccaagcacttcagcgcgcccaacctgcccgacctcaaccgctcccaggtgtacgcagtaaaacacgctctgcagcgccccctatcactcatccagggcccgcccggcaccggcaagaccgtcacctccgccaccatcgtgtaccaactagtccggcagaacggaggcccggtcctcgtgtgtgcaccttccaacaccgctgtcgaccaactgacggagaagattcataggacggggttgaaggttgtcaggctgtgtgccaagtccagggaagctatggagtcttcggtgtctttcttggcgctccacgaacaagccagggcgttaggttcagctgatagtgagctcaggaagctgacaagactgaaggaagaagcaggggaattgtcagcggctgacgaaagaaggtacagggcgttgagacgagcggcagaaagaaggttgttggatgcggcagatgtagtttgcactacgtgtgtgggtgctggtgacccgagagtggctagaatgaggttccagtcgatcctgatcgatgaaggcatgcagtctacggaacccgagtgtatggtgcccgtagtgctcggcgctagacagctgatactggtcggag

SEQ ID NO: 310 - DNA, 1067 bp, Plutella xylostella
  misc_feature (1)..(1067): Gene targeted: sr; Universal ID: GS894
gtgtgaaatatgcggaaaagactttaagagaaaacatggattaaacgaacacatgcttgtccatacgaaggtgaaaaagtactcgtgtgaaatttgcaacaagagttttggacacagccagacgttgaaatcgcatgaacgcactcacacgggtgaaaggccgtacgtgtgcgatatctgcgggcgcggatatccgcagagtgctcatttaagacgccacatttttatcattcacagtggtattaaaccacacgcttgcacaatttgcaaaaagaagttctctagtaaaggatacttatctattcatcaaaggacgcatacaggagagaaacctttttcgtgcgatgtgtgcaagaagccgtttgcggcgcagacaacgttgagagtgcacatgcgtgtgcatactggcgaaaagccatacgcgtgcgctatgtgcggtcgtcagttcgcacagttcgccagcttcaaacttcacgagagatcgcacacgggggaaaagccgttcgcgtgtaaaatatgtaaaaagacgttttcggataagggctacttacggatacatatgcggacgcatacaggtgaaaagccatacacatgcgatgtgtgcaatagacaatttagggagtcggggcagttgaaaaagcatacccaagtgcacacgggagaaaaagtgacatgtaagatttgtaacaagcaaatatcaagagatctaactaaacacatgcgggtacattcgggtgagagaccgtacagttgtaatatgtgcgataaacagtttgcggtgagtggcaatttaaggacccatatgagaacgcatactggggagaagccgtatgtatgtgaattgtgcaataaaccgtttagtcagagcggtacgctcaaaagacatagatgcacagttttggagaaagtgggagatgataatgtgtagtgacagaacatactgggctaactatattttgtaaaatagcatgagtcttattttgttaatatagcatgagtcttataactttattggcagataaaatatgtgtaacttattacgtataaataaatagtttcatgataat

SEQ ID NO: 311 - DNA, 2822 bp, Plutella xylostella
  misc_feature (1)..(2822): Gene targeted: Fit1-2; Universal ID: GS897
tatagctatttttaattaaactttaagtaaatgaggcaaaacatcaataaaattaaacccaatgaaaccgctcctgtaattcgagattcgagtcgcattgaactgtcaccgccaatcctcagtctctgtctctcagtatcgttgagtatcgtgagccgcggcaaggcaaccgagtcccctcgcccctccgtccggaccggcctcctcactcctcctcaggtcctcagttgtcttcgggcttttgcgtcgaccgctcgctcgaacattgccgcgtagtttacctggacgtgacacccgcgatgtgcccctgatagtgacattttagtgttgtgctctcaaggactggtccaaaatgttggccgacggggaactggtaggagacgggtcgtggaacctgaccatctatgtgagtgacatgaatatgtcacgtacgatggtcgcgaagggcgacatgcacattggaggagtcatgctgaaactcacagagagctttgaattcaaaaaggactggtcggaccacgctctctggtggccgcagcgcaacaagtggctgtcgcggccgaagcacaccctggaccagtacggggtgcacgcggacgccgtccttcacttcacgcccatgcacaagccgctcagggtgcagctgccggacctgcgctatgtggactgcaggatcgacttctcgattaacacgttcagcgccgtggtgcagctttgcaaaagtcttggaataaggcatccggaagaactgtcgctatgcattcctctggagccgtcgcacttgaagcagaactaccagagcctcaaggaggtgaagagacgaggcaacatgtcgcccgccactaacaacttcatcggcatgacacggggttcgtccaacagcctggacaagtccaacgggggctgccccgccacgccgccgccgccgcggtcgctctccgccacccctgtggcttcacaacagaacggcacgctacgtcgttacggcgggcacatctacagcacacagagcgacggctcaagcgacggcggctattgcggcacccctccccgcgccgcgtcccttgacgccctggattcattagccgacctctcattggctgactctcctatcgaccccggcccgcagagtagagagtctttgctgaccccgaagtcgctgatggaacgagcgaggatgaatgttggctggctagactcctccctttcaataatggagcaaggcatccgcgagtgggacaccctccagctgcgcttcaagctgtactccttctacgagctgtcggctcgacccgcggacgccgcgagactcaaccagctgtaccagcaggcgcgctggcagctgctgcaccaggagctcatgtgcaccgaggaggagatgatgctgttcgccgcgctacagctccaaatcgagctgcaaaccctggcgggcggcagcacagagtcggtcgacggcgcgcgcgccccctcccccacggccgcggcggcggaggacgagatcgacgccgcgctgtccgagctgcaagcgcagctggagggcgggccgccgcccagcggagatattacctcggtgccggagctggccgggtatttgaagtatttgaggccaaagcgcttcaccctcaaagcttacaagcgcggctgggtctcctgccgcgacggcgtcctccgcatccattcatcacgcgaggcggcggcggcgggcgacgcgccgtcggtggtcgtggagctgcgctgggccgaggtcacgccggacgcgcaccccgcgcagaggaaatatgcgatcaagctggaagtgccgtcggaagatgccatgcatgagatgtggctgcggtgtgaaaatgaggaccagttcgctgattgggtggcggcgtgccggctcggctcccgcggccgctcattggccgattcctcgttcacaacagaagcagcatcagtcaaggcgctgctagcgctgcagaagccccaagtgggcgtggccacggtgcagaacctgcctcatcacatacagccggagaactatgtcgcgccacggtttatcaagaaactgaaggggaaactaactcagcgggtgctcgaaagccacgccaacgtgaaggacctacctctcctagaggccaaacttcagtacatccgagcgtggcaagccctaccagactacggacagtctctgttcgtggtccgcttcatgggacacaagaaggactcgctcatcagtgtcactaacaacaggctgatgcggctggatcctaatacgggggaccatatcaagacgtggcgttatagcactatgaaggcatggaacgtgaactgggagatcaagcacatgatggtccagttcgaagagggcaacatcatattctccgtgcaatcagccgactgcaaggtggttcacgagttcatcggcggctacatattcctgtcgatgcggtctaaagacgcgaaccagacgctggatgaagaactgttccataaactcaccggtgggtggacgtaggtgtctatggtcgggtttgtctatggtcttttttgttttttttttgtttcataaattttaatataagcgaatgtgttggtatggatacggaagccggtttttaagggaattcttacgtggaacggtctactatagtaaataatttcagttcaaactggaattcgcatgagtgccccaagcgacgcaaacactactaagtattgtgaaaatgaacttacaactgaaaaaatatttttaaatataatgtagagctagcctacgaaattcatgaatgtattatacaaactataaatgtttattctgaaaagagagtatacgattcgaa

SEQ ID NO: 312 - DNA, 1950 bp, Plutella xylostella
  misc_feature (1)..(1950): Gene targeted: RRM domain-containing protein; Universal ID: GS903
agccccagcagtggagatgtgatgagttgatgagacttgactcgcagacatcataatatagttggtttgcaaagcacttttccatactctgagattacatcaaattaagaaattacacattaaattgttaatgccataggaactattttgcattacttgtatcttatcttacaggcctcaacgcaaatacaacagtggaaacaccattgcttcatgaacagcatctgctgaatgttccatctgtctcaacataacataggtctgcctatttaacaaaggctggaccattaaaagaaatacaaaatatgcctatgattaccctcagtgaggttgaaatgtcaaagcaaagagattatctgaacgataaagtaaatattgctcccagcttgaaacgtaattatatatcaaaaaattggaaaaatgaaagtcaaatatgcaagtcaagtattcagtgcaactgttgcatcgaacatgggagaccttgcagacaagaaaatactccctgaagaatgcaaggagactgcagatatattattattattatttgataaattatttgattcagtcaacggtagcttcaataaaaagacgcgtttcgcaaagccgcttttagttccagcaacaccaacatctcttcaccactaaacttgggacgaaggaagaaaaatataaaaaaactatgaaatttgttactgctgtaggggaaaaggaagtggtacccacaattaatagttggttttggacattggaaggaatggagattttattaaaaaaattgaaagaggaacataatgtaacctcaatttggatgcgccacctgaaccaagacccaattgaaaattgttttggtgccataagatcccacggatgtcgcaacaccaacccgaccccggagcggtttgagtaagcatttacgaccttgttaatcaatagcctgaccagtgtccagtgtccacgccccgggagggaattgtgaaaaagatttaggagaagcacttataaacttgattgatgaagactgcaaaggcaatgacgtctcatcatgtgaagtgcttttgactgatattttatccatagaactagagtcaatggaatcaaagaaggatcctaaaatattggctcccttacaatatgtaagaggacactttatcaaaaaatcgaaaaagatttacaaaacatgtaaaacatgccacgatacgttattggcaggtgaagaaacggagtacatcaggtacagagaatatgcaggtcgtcgttggctttgcagcccaagtgactcagtcgtcaatttgatatcacatatgcaggatgtagcaatggttttattaaaaagcaacttagaaatgaataatttaaaaccatatatatctacagtgatttacacattagtagattttaataaattatctgattgtgagaatcataaggagaagctgattcaattcctaataaatgctgtttgtcgattctttatttacaattattgtaaactaattaatagaattttatgtggaaaaagggatatcgacgaccttaacgacaaataccaaataatggcaaaaacatcatttcaaaaaggccttaagataaaaaaatgataattggacccattcattggtttttgttgttaaggccttgtcctttctcatcccaccacttgcggctaccgtcgaacgggtcgacgaaagtcccacgcaacgcttgcctgtacgtggacccgtaaactcgtgtatatacttactccaacggtcaccagccacctgtgtatttatttacttatgttgacgttaacattaagtggtttatatgagacaaacaactttgtaaattttaccaactcatgttttgatcgggttcccctcatctcgcctaatctttattgccctaaactcgtttcgcataactcgtagggtctaaacttttttggtagaatcatcactttgcctagac

SEQ ID NO: 313 - DNA, 467 bp, Plutella xylostella
  misc_feature (1)..(467): Gene targeted: Tc croc; Universal ID: GS906
gcggcgcgccatgccgcaccatgagtccgccgcacagcttcgccatccgcgacctgtgccccgaggccagctcgcgcagcccctcgcccgacgccgacctcgacgtcaccggcactgagacccctcctcccgcaaccaccaccgatctcgagaagaagaaaaacgaaaaacccgcctacagctacaacgcgctcatcatgatggccatccgcagcagccccgagaagagactcactttaaacggcatctacgagtacatcatgaagaacttcccctactacaaagagaacaagcagggctggcagaactccatccgacacaacttgagcctgaacaagtgttttgttaaagtcccgcggcactacgacgaccctggtaaaggtaactactggatgctggacccgtcgtcggacgacgtgttcatcggcggcacgacgggcaagctgcggcggcgcagcacggcggcg

SEQ ID NO: 314 - DNA, 2523 bp, Plutella xylostella
  misc_feature (1)..(2523): Gene targeted: Protein kinase; Universal ID: GS889
gtgaagttgaagttgaggataaaaatacttttgtgtgaatttctcttttattcgtttatttttaagtagataaatatgaaaattatcatgtctctctgattactaatagaacggaggataggttacattaataggttgtttctactgaaatggaggaggaacaatgtctgctcgagtgtgaaagctacattcagagccacaacattcaagtattattgaaagagtgcatcgtacagctttgcgtaaacaaacctgaaaatcctgtcacattcttgagacaacactttcaaaagctggagagggaacaagtgaaggcagcccaggctgcagcggcgctgtcggagggtgaggcagacggggagctgtccccgctgcccgtgcccggcggcctgcccccgcggcgccgcggcggcatcagcgccgagcccgtcaccgaggaggatgctactagctatgtcaagaaggtggtgccaaaagactacaaaacaatgggtgctctgtcccgagccatagcgtccaatgtgctgttcactcacctggatgagtcggagcgggcggacatgtttgatgccatgttccccgtgcaatgtcttcccggagagactgtcatcaggcagggtgatgagggagacaatttttatatagttgattctggagaagtagaggtgctagtaaacggcgagccagtgacaatgataagcgaaggcggcagtttcggcgagctagccctaatctacggcacccctcgagcggccacggtgcgcgcgcggacggcgctgaagctgtgggggctggaccgggactcctaccgacgcatactcatgggctctactattaggaagagacggatgtatgacgagttcctgtcacgtgtgtctatattagagagcctggagaagtgggagcggctgacggtggcggacgcgctggagccggcctcgttcacggacggcgagaccatcgtgcgccagggcgagcccgggaacgacttctacatcatcgtggaaggcacagcagtagtacttcagcagcgcggcagcggcggcggcggtgcggcggaggcggtggaggtggggcggctcggcccctccgactacttcggagagatcgcgctgttgctggaccgtcccagagccgccacggtccgcgccatcggaccgctgaagtgcgtcaaactggaccgggctagattcgagcgcgtgctgggtctgtgcgccgacatattgaaacgcaacatcgctcagtacaacagtttcgtctccctgtccgtgtaacaaccgtcaccaaacaaacgatctattaacgtggactgacattatgctagatgtgaaaaatgtaactatgccataatgtatgtttatcttccaaaacatgttgaagtgttgttgttagtggttaaaatacggtcagcgttggccgtgcgatttgccagcgcttatgagaagtctagtgcgcctaaatctaggtgaacaaatggactaggttatctcttgtattgacatgtgaggtacagagagctgatactgctgtgttttaagcataagtgcgctcactattaattaacgcacacattggtatgattatttatatatctactaaaactgtcaaacatgaagctacgacgacggggcggactgcgttcagtctgatatctgaagtcggatgttcggtcgcttaaaccgtgtcgacgccattaatcgaagaataaataatttaattaatatatgaaaagcagatgtagtgttagattggagtcatgatgaaattacttatttactttatagcatttgctagaaaacaaaagctgaaatttggtagcgatttttgcatctattaacctgggccccaagtctgctaaagaatggcggcacagttgtgtgtcggcagcatgggtttcgcactgtaggtattcattatctgcgttttaggaaacatttattgcatcttttttaaagaactaactttaataaacagtaacaagtgttaagtgtttcatattgcactactgggactcactaaccaagataaaacagatacctaaagtcggcaaaccattcagacgacacagcactgagccaacattcattagcagactcgaggccctgtataggtgcggatacaaacttaatgataatggttaagtgcagtatgattaattaaactaaatcctttacaatttcggtagttctaattttaaattttatagtttaatggcaataactaattttatttattttataaatcgcagttgcaataagagttgtgttattttatacataaatatatcacgtaggtaattcacatacgaaaaatcctgtgacatcatttacacaatactattgattaattaatatatgtattatgttttataattattaccattagtttgttatagtagaatgagtattttcagaggttagacttatacctaccaccaattacctattggctacctattacttaaagtcgggttctgaaaaaaaccaacaacttgagtgtttcttaagttaactagatactttt

SEQ ID NO: 315 - DNA, 1705 bp, Plutella xylostella
  misc_feature (1)..(1705): Gene targeted: Arp3; Universal ID: GS904
taatattagtcatccgtgtgtcaatgtcattatttttgacagaaaaatcctgttcgtggaagaaagtcatcaccgcgccctatttgttgataaaataaacaataaaggccaaattgaatactttataaagttaataattgattacattaatctggaatcatgggtgatcacttgccagcttgtgttatcgacgtggggaccggctacacgaagttgggcttcgccggcaacaaggagccccagtttatcattccctctgccatagcgataaaggaaactgcgaaggttggcgaccaatccacacgccgaatgaccaaagcggtcgaagacctagatttcttcatcggcgacgaagcgttcgacgcgactggctactccgtcaaatatccggtgcgtcatggcctcgtcgaagactgggacttgatggagcggtacattgaacaatgtatcttcaaatacttgcgggcggaaccagaggatcatcacttcttactcactgagccccctctaaacacgcctgagaacagggagtacttggcagaaataatgtttgagtcattcaatgtgcctggcttgtacatcgccgtgcaagctgtgttagcgcttgctgcgtcgtggaagtcccgcacttctgctgaacgcacattcaccggcattgtagtggacagcggtgatggagtcacacacattgtgccagtagcagaaggttatgtgattggttcctgcatcaagcacatccctattgcaggaaggaacatcacttctttcattcagtccctgcttcgtgagcgagaggttggaatccctccagaacaaagtctggagactgcaaaagctatcaaagagcggtacagctacatttgtcccgacattgccaaagagtttgccaaatatgactctgatccagtgaaatggatgaaaaaatatactggtgtaaacacaattactaaaaacccattttctgttgatgtgggttatgagaggttcttggggcctgaaattttcttccacccagagttttcgaatgctgactttacagtgcctctaaatgaaatggtggatgatgtgattcagtcatgccctattgacgtccggagaggcctgtatggaaacattgtgttgtcaggaggctctactatgtttagagactttggcaggaggctgcaaagagatataaagaggactgtagatgcaagactgaagctatcaacaatgctatctgagggacggatcacaccaaaacccattgatgtccaagtgatctctcacaacatgcagaggtatgcagtgtggtttggcggcagtatgctcggctctacgccagagttctaccaggtgtgtcacaccaagcaagcttacatggagtatggacccagcatctgtagacacaaccctgtgttcggtaccatgacataaacctctcagctgccagtattgagtcatttattatgaacaactaatatttaagtgtaactatgaatttatctttaggtttctacttttgagtacttcaattttagtattaatttttaattaagtgaataaaattgttttaataaacaacaatatattgcatatagaagacaataaattatgattattatgttcacatacctatgtattttgagattcttcagtttttaatacattgtattttatgtagctgggcgcattgtaataaatttatagcatttaatattgcatt

SEQ ID NO: 316 - DNA, 829 bp, Plutella xylostella
  misc_feature (1)..(829): Gene targeted: Arp2; Universal ID: GS895
gtgtgcttgaccgaagcagcacgagtcgtacctagtcattaacttaatatttaacaactaattcaaaatgtgcgacgaggaagttgctgcgttggtagtagacaatggctccggtatgtgcaaggccggattcgcgggcgatgacgcgcctcgcgctgtgttcccctcgatcgtgggcaggccacgccaccagggtgtcatggtcggcatgggacagaaggactcgtacgtaggtgacgaggcccagagcaagagaggtatcctcaccctcaagtaccccatcgagcacggtatcgtcaccaactgggacgatatggagaagatctggcaccacaccttctacaacgagctgcgtgtggcgcccgaggagcaccccgtgctgctcacggaggcccccctcaaccccaaggccaacagagagaagatgacacagatcatgttcgagaccttcaacacgcccgccatgtacgtcgccatccaggccgtgctgtcgctgtacgcgtccggtcgtaccaccggtatcgtgctggactccggtgacggtgtctcccacacggtgcccatctacgagggttacgccctcccccacgccatcctgcgtctggacttggccggtcgcgacctcacagactacctgatgaagatcctcaccgagcgtggctactccttcaccaccacggccgagcgtgaaatcgtacgtgacatcaaggagaagctctgctacgttgcgctcgacttcgagcaggagatggccaccgctgcctccagcagctccctagagaagtcatatgaacttcccgacggtcaggtcatcaccatcggaaacgag

SEQ ID NO: 317 - DNA, 2876 bp, Plutella xylostella
  misc_feature (1)..(2876): Gene targeted: TAR DNA-binding protein 43-like Protein; Universal ID: GS890
gaccgaagaaatttcgaattttcatgttgtattatccgtttactgatactaattattgtttttagtacaaatactaaagtaacgatgagtaataacaagagtgacatgttcaatgatgaactttttgattatatccgtgtaagtgaagatgaagatgacaacaacgctgtggaaattccctgcgagttagacggcactctgttgctctcaactttagtggctcagtttcctggggcgtgcgggctcaaatatcgacaccctgaaagtaaatctgtgcgagggattcgactcagtgatggaaagttacatccgccatccgaagccggctggggtaagctgctctatatttgtgttttccccaaagaaaataaacgtaaaatggaagacgtttcacctgaaaactctgctgccaaaacaaagcggctcgagaagaaactaatttgctcagacttgatatgtctcggactaccgtggaaggcaactgaagaaacaatcaaacagtactttgaacagtttggagaggtggttatggttcaactgaaaagagataaaaatggaaccttcaaaggatttggcttcatccgttttgctacatatgcttctcagatgagagcacttgcacagagacacaatattgacggccgctgggtggatgtgaggatccctaattcaaaggaaggtgttgttccgcaaatgccttgtaaagtatttgttggcagatgtactgaagatatgactgcagatgaccttcgagaatatttttcaaagtttggtgaagtaactgatgtgtttgtaccacgtccattcagagcttttggatttgtaacatttctggatccagaagtagctcagagcttgtgtggtgaagaccatgtgatcaagggagcatcagtatcagtgtccagtgctgcacctaaaattaaacccaagggcaatcagaattggaagagtgactcttatggaccaccaaccaactgggacagcagtcgaagtggaccgtcgggggcctccaacagcaatggaggtgccagcagcggaaacattgacacattaaatatgcagaacttagggattaaccctaatggtggaccaccaagtaatttcaatttgccaattagtctagttgctgctgccctcaatcaagctggctggggaggattcctcggtggccccaacaacagtggccctagcaactggcaagggggacctcagggaaacagtggaaaaaactggaatggaaatccaaactggaaccagaatggacccccacagtcatggaaccagggaggcagcaaccctaactggggaggtggaaagggcaactggaacaaccaaggaagttggtccaatgggcagaactggggaagtaatggaggcggtggagggtccagtgggcccagcagcagctggaacagcaagccgcagacatgagtcgcaggtgagacccgctcatgttcctcgctgacatgtgcaaaactagatttctagttcattttatgtcacttatcatctctaaatattaatagtggtctttactatgtgtatgttacttttaagggatagtttataaattttatagatggactgattgggactatatgctgtcatgaagttagattattatgttcagaaaaggcatgagctagataaaaggagcattgttgaatgtctttgcattgagagggctgtaatgttctagatttaatctgactttaagttttcacataaatgtgtgttctttatgatggtgatgtgttgaggaaacttatcaaataaaagtgtatgtattacagagatggatgttttctttgactatgaaagtctgtgtgattttataatttagttaaataacaatgattctgatggaatgttaatatgcaaaagtatttacgtaaacttatgaatatactaagtaaaataagactaggaatgtgataaatgattattgtgagatcttgaaggatttttcatgtgtgtaaataatatgaagaagcaagatttgaacaaaatgggtgctatccattatgattggaataaaaattacaaaattgaagccagggtgcaagtaatggttgggctgagaagtaagaattcattttgattataacatttttatttttttatgtgagtggaaataatgtgtaagttttctgttctctagctgttgagagtggcagtagtggcactgttgcaggtatagtgttggctgatgtgtcattcttgaatgtaactactgaaggatggcttgtggtaatgtgctgatgtttttttatataaattctgcagttttatggatttgttttaatataaattcttctgtattaacactacatctctcgaaatatcacacaggttcatagaccggagtttatgcatcagaaatttattgtcgactgaaaatcgtcaagaagcaaaaagcagtgcagcaatgacatgggatactgaggtatatctttacatttctttgttatctgaaataatagctgatcaacctttatatgtattcaagaattttacctaggtacttgataacaaaacaagatcacttttgaagcagtactatgaatatttgtaggtatggtcccaatgactggtcggtcatccttggataaaaaaatcatccttgactggtctccataataagtagcagcagcgcaaaaaaaaatatcatggtgctgtgctcaactgctcataactctgtataaggagtgtgttcgcaagattttcaatgttaataaaaaaaataaaaattttcgcagatggcgagtagccgagttgctggactttgtggcatgaccgtcttcgtacctattcaattttcatgatggtggtatgattaatgattctacaaataaataaataactatgtacgcaca

SEQ ID NO: 318 - DNA, 4856 bp, Plutella xylostella
  misc_feature (1)..(4856): Gene targeted: wb; Universal ID: GS898
atagacggcgcggagctgagcgcgcgtcccgacatggcccgacccgcggcgctcacgctgagcctgctcatcatcagcgccacccacgcccaggactactacaagacgcccagaataggcccctccaagctcgcctcctgctacaccaacgacggacaaccacagcgatgcatcccggagttcgagaacgcggcctacatggtgcagatggacgtgaccaacacctgcgccgacagcggggagaccatgtactgcatccagacgtctgcaggcacctccaccaggtcctgtgacatctgtcagccgaaccagttctcgagctacttcctgacggatcttcatcacgagcaggaggaccagacctggtggcagtccgagaccatgaaggagggcatccagtaccccaaccaggtcaacctgacgctgcacttaggtaaggcctacgacatcacgtatgtgcgcctggtgttctactcgccgcggccgcagagctttgccatctacaagaagaccagcgaggattcagactgggaaccattccaatatttcagtgcctcctgtcgagacacgtacggcgtgacggagcagcgagcggcggagctcggggctgagaccagggccctctgtaccagcgagtactcggacatatccccgctgtctggaggcaacgtgttgttctctaccctggagggacgcccctcggcctacaccttcgataatagtccggaactgcaggaatgggtgacagcgacggacctgcgcatctcgctcgaccggctcaacacgttcggagacgagatcttcggggacgtgcaggtgctacagtcgtactggtacgccatcgctgacgtggccgtcggggcgaggtgcaagtgcaatggacacgcgtctgtgtgcgacactcaggaggctgctgatgggtcgaggagccgcgcttgccgatgcgagcacaacacggcggggcgcgagtgcgagcgctgcctcgacttctacaacgacgcgccgtggggccgcgcctcccccacgaatgtacacgaatgcaaagcgtgcaactgcaacggtttctccaacaagtgttacttcgacaaggagctatacgagcggacgggccacggcgggcattgcatcgagtgcgccgagaaccgtgacggggccaactgcgagagatgtcgagagaactacttccaggcggccggcgacgtgtgtctgccgtgcaactgcaactctgtcggttcccgcagcctgcaatgcaactcggaaggcaagtgccagtgcaagcccggcgtgacgggggacaagtgcgacgtctgcgagccgaaccactacgagttcaccacgcagggctgcaagccttgtgggtgcaacgagtcagggtcttacgggaacacgccccgctgtgacccggtgtctggagtctgcatgtgcaagcagaacgtggaaggaaggcgctgtagagaatgcaaacctggcttcttcaacttggacctgacgaacgacttcgggtgcaccccctgtttctgcttcggccactcctcggagtgtgactcggcgcccaagtaccaggcggctctcatcagcgctcacttcatccgggacagcgagaagtggaaggcagaggacgaccacaggaccatagtgccgctgcagttcaatgctaacacgcagaatattgccgtatctgccaagaactcggaagtagtctacttctcggcaccaccacagttccttggagaccagcgagcctcatacaaccacgacttaaagttcactctgcggctgggtgaagacagaggttacccatcctcccaggacatcatcctggaaggagccaaaacttccatttctatgaacatctacgggcaaaataatccagagccaactgatcagcctcaagaatacacgttccgtctccacgaagattctcgctacggctggacgcctaccctctcaaccttcgagttcatgtctgtactgcaaaacatcacggccattaaagtcagaggaacgtacaaccgagctggtgtcggctatttgatgaacttcaagttggagaccgccaaagaaggcagggagaagggttccgggccagctaactgggtggagaagtgttcgtgcccgaaggcctacgtcggggactattgtgaggagtgtgccccagggtacagacactcgccagccaatggaggcccgtactccaggtgtataccctgtgactgcaatggacacgcccatatctgtgacacttctactggtttctgtatctgcaagcacaacacgacgggcagcaactgcgagctctgtgccaagggctactacggcaacgccatcgccgggactccggaggactgcaaaccctgcccgtgccccaaggacagtggctgcatccagctcatggacggtggcatcgtctgcactgattgcccgaatgggtatgctggaccaaaatgtgaagtatgtgcggacggccacttcggggacccgttgggccagtttgggccaggccaggagtgccaggagtgtcagtgcaacgggaacgtggacctgaatgctgtcggaaactgcaaccgcaccaccggagagtgtttgaagtgcatctacaacactgctggcgatcattgtgacaagtgcttgagcggatactacggagatgccttggatcagaagaaaaagggtgactgcaagccttgtggttgccatgagcttgggactattgagagcaaggaggggccaccggagtgcgacggcctgaccggatactgttcgtgcaggccccacgtcatcggccgcaactgtgacaagtgtgaggacggctactacgacatcaactcgggcgagggctgcaaggcgtgcgactgcaacctcgagggagcctacaactccacatgcaacgcctacaccggacagtgctactgcaagcctggcatcactggtgcccactgcgaccaatgcaagccgtaccactacggattctccatcgagggctgcagcgactgcgactgtgatgagtggggctccaccaactaccagtgcgacgtcaacggacagtgctcctgccaggagaacgtggagggccgccggtgtgacaggtgtatggaaaacaagaagcgtcgtggtgacggccagggctgtgaggactgtcccgcttgctacaacctcgttcaagaagctgtggaccaacacaggcaagaactcaaggagctggatgagatcctgtcaaagatctccaaggcgcccacggtggtggagaacgcggacttcgacaacgagttgcgccgagtccgggccgagatcgaacagctggtggctgacgcgacggcggaggagggtgcgggtggcagctccgtcactgacaccctgggggagttgggagacaggatcgctgatatcaggaacatgctgctgaaggtggacgccggcagctatgagggcaaggacgccgtggagaggagcatgggcaacatctccaaggccgaagacaccattgaggccgctcagaaggaaattaacagcgccttagaatacttggacggagagggcgcagcggctctcgctaaggccagaaacagatcggagcagttcggcaaacagtcggtggacatgtccagcttggccaaggagtccagactgatggcagagaaactggaaaacgaggcaaagaacatcaaggagatcgccgacaaagctcacaacacctccttggctgccaacacactggccaaggatggcatcaacaagcaggctaatatcagtatggaagtgcaaattctggccaacgagctcgacggagccaagggcaagctgagcagcatgacggaactggcagaacaggtgctgaagagggctaagacggtctacgaagaggctctggaccaatatgcagaggtcaacaggaccatcctcccagactacaaactccaggatatccaggggagcgctaaggagctgaataagaagatcgacgagctcagcgagaagctgaagaagctggaggaagagaacctgggaccgctgcagagcctcgaggaggccgtcaggcacggccgcgagctgctcgaccagggacatgacagacaagacgagttgaacgagctgctgacccgcctggacgagctgcaggcgctggccaagaacgacgtggagctcaccaaggacacgctcaaggacgccaacgagatctacaagaccttgaaagaattcagcgaccaagtgacagagtcccggcagcaagcggagcaagcgctgctcgacgtgcccacggttcaggcgaaggtggctgcggctgaggacagcatctccaacatagtggaggagctgaacaccgccagcgaccgagcgcgggacgcccgcgatctcgcccagcaagcgcagaaggactacgctgataaggcttcggaggcagcacacgaaattaaaaagaaagcatcgtcggctagaaccgaagctggtaaactgaaggatgaggctgagaagttatcaggtcgcgtggaggagaccggtaagcagatccaggagctggagacgcaggccgccgacaacatgcagctcaccaaggacgccaagatgaaggtggcccaagccaacacggatgcgcgggaggccgagaagcaggtgaccagcgggctggaggacctccgggtcatcatggaggaactcaagaacctgcccaccctcgacgatgaagccttgaacaggctacaggagagtctggacacggccgagattgagctgcagacggccgacctggacgggaagatcaaatccctcaccgaagccaagaataaccatcagagatggatgaagcagtaccaggacgagcacgaccagctcagccaggaggtggccaacgtgaaggacat

SEQ ID NO: 319 - DNA, 5854 bp, Plutella xylostella
  misc_feature (1)..(5854): Gene targeted: Unknown; Universal ID: GS984
cggctcaacaaacagacagtgtttctcgggacgtactagagccgggtcgtgcgcgttactgtgcttgacacaaaaacgaaactttgtgtcaaatcgtgattgaaacgtttgtgttttgacagaagtgaaagatcaggctgtgtgggtgtgtggttatgtggcggcgagtgatatgacagcgtgcgtcgccagacggactccggccgtcttcatgaggacactggtgacaagactggccccgagatcatggtggctcccgattccgaggctccttcgaatcctcggatagctggcgcccgcgagagtcagtcggcggcggaggcgcgccacagtgcggacctctacatccgcaccagctgggtggatgcagcacttgcactctcagagttagaaaaggggaacatcgagggcgggcgcacagcgctgtggatccgcgcgtggctgcaggaacagctgttcatcttgggctgcttcctccagggagacgcggggaaggtcctcttcgtcgccatcctagtgctgtccaccttctgtgtgggactcaagtcggcacagatacactcgcgggttgaccaactgtgggtccaagagggcgggcgcctggaggccgagctacggtacacggccaaggcgctgggcgaggccgactcctccacgcaccagctcatcatccagaccgccaaggaccctgacgtctcgctcctgcatgcaggggcattgctgcaacatcttaaggtggtgcacgcagcgacgagggtgacggtgcacatgtacgacatcgagtggcggctgaaggacctgtgctacagccccagcatccccgacttcgaggcgtaccacatcgagaagatattcgacaacatcatcccgtgcgccatcatcacccccctcgactgcttctgggaaggctccaagcttcttggaccggattatcctattttgataccgggtctccgagagcggttgcaatggacgaacctcaacccgcaagagatcctggagaaggtgaagaagctgaactaccagttcccgctgagcaccatggaggcgtacatgaagcgcgccggcatcacctcggcctacatgcgcaagccctgcctcgaccccgccgacgcgcagtgcccggaatcggcccccaacaaaaaatccggacagattccagacgtggcggcggagctgtcgacggggtgctacgggttcgcggcggcctacatgcactggccgcagcagctgatggccggcggcgtgacccgcaacgccacgtcggcgctgcgcagcgcgcgcgcgctgcagtccgtggtccagctgatgggcgagcgagagatgttcgagtactgggccgagcactacaaggtgcaccacgtgggctggacgcaggagaaggcggccgccgtgctcgacgcctggcaacggaagttcgctgccgaggtgcgtaagacgtcgtccaacgacgacgcgtcggaggcgtacagcttcttcccgttctccacgtccacgctcaacgacatcctcggcaagttctccgagctcgagctcaagaacatcgtgctggggtacatgtttatgttaatttatgtagctgtgacgttagtgcaatggcaggacccagtgcggtcccaggcgggagtcgggatcgcgggggtgctccttctgtccatatccgtcgcggccggcttagggttttgtgctttactaggtataccattcaacgcatcaagtacgcaaatagttccattcctagcactcggtctaggcgtgcaagacatgttccttctcactcacacgtacgtggagcaagcgggagacgtgccgagggaggaacgcacgggattggtgctcaagaagagcggcctcagcgtcctgttggcgtctctctgcaatgtcctggctttcttagctgcggccctgctgcctatacccgcgttacgggtattttgtctacaggctgcaatcctcctgctgttcaacttgggatcaatactactagtgtttcccgcaatgatatcgatagacttaagaagaagatcggcagcaagagctgactttttgtgctgcctgatgccagaaagtccacttccgaaacgaactaagaagattgaccaccgattgaaatctctgccaaagaatgaaaggaatgcgtggaaagataccaccaagcagccattagatccggacgatgaaggtgatgaagcgcaaaagagctgttgcctcagtttgtcattaactaaatgggcgaagaattactacgcgccatttattatgcgccctgctgtgaaggtgacgtcaatgcttacattgatagtggtcgtcttggccagcttatggggagcaatgaaagtcagagatggtttagatctaacagatattgtacctgaaaacacggatgaacatgaattcctctcacggcaagagaaatactttggcttctacaacatgtacgctgtcacgcaaggagacttcgaatatcccaccaatcagaagcttctgtacgaatatcacgatcaatttgtcagaataccgaacatcatcaaaaacgacaatggaggcctcacaaagttttggctgagcctgttccgagattggctattagacctgcaagaggcttttgacaaagaagtcgccaatggatgcataacaccagaatattggtgcaagaacgccagtgatgaaggaatcttaggatacaaactcatggtacaaaccggtcatgtggacaatcctattgacaaggctctcatatccaatgactctaaaggacatagattagtcgataaggacggaattattaatcctaaagccttttacaattacctatcggcctgggctacgaacgacgctttggcatacggagcttcacaaggaaacctgaaacctcaaccaaaaagatggacacactcgccgagcgatgtagatctgaagataccaaagtcgtcaccactcatatacacccaactgcccttctacctatctggtctgagcgatacagagagcatcacgaacatgataatgacagtacgagagctgtgtctgaagtttgaagctaaaggtctatcgaacttcccgtcgggcataccgttcctcttctgggagcaatacttgtatctgcgatggtccttgatgttggctctggcttgtgccttagcggctgtgtttgtggctgtgatggtgcttctactgaatgtgtgggcggcgacgctggtgacgctggccatggcaacgctggtgctgcagctgatgggcgtgatggcgctgctcggggtcaagctgtccgccgtccccgccgtgcttctagtcgtttctattggacgaggagttcacttcacggtgcacttgtgcttggctttcgtgacctcgatcggctgcaagcgccggcgggccgccctggcgctggagtcagtcctggctccagtagtccacggggccatcgccgccgcgctggccgcgtccatgctggcctgcagcgagttcggcttcgtggccagactgttcctcagactgctcctggctctggtgctgctgggactgattgacggactgctattcttcccggttgtactggctattttgggaccggctgctgaggtgcaacctttagagcatccagagcgtctctccacaccctcccctaaaagctctcccatccacacgcgcaagtcgacaggcaacagtcgcgacgacaagtctcgcaacaagtcggcgccgcgtccgtgcgcgccctcgctcaccaccatcaccgaggagccgcccagctggcacagctccgcgccctccgtgcagtcctccatgcagtccatcgtggtgcagcccgaggtggtcgtggagactactacgtacaacggcagcgactctgccggtagcggacggtctacgcccacgtctaagtcgccgcatccaggagctatcacgacgaaggttacggcgacagccaacatcaaggtggaggtggtgacgccgggcgacaggaagtcccgtcgctcctaccactactacgaccggcgacgcgagcgcgacgacgaccgagattaccgtgaccgcgacagagaccgcgaccgcgaccgagaccgctcacgcgaacgcgaccgccgggaccgcgagcgcgaccgctaccgcgacgaacgcgagcaccgcgcctcgccacgcgagaacggacgggactccggacacgagagcgactcctccagacattgaggaagtgctagagacaatatcaggactcataccagtcactcgattgacgactgcatatagttacgagagtagttattcttgttattttgacatctttaccgtaaagttatgtcgcaatatgccttatgcaatgctcttgctagcttcagtagcttgctagatttcaggttgtttaacaaacgttaccgtgacttgtaacgtttaattaagtcgctctatatttacacacggaggctaaaatcggttatcaatgtttagtttacgttaaaatcattgtaagtgaaatcattaaaggactaaagtcattccacgatttggtttgtctcttacaaaacgttaggattccgtgcctgccgtgccggaggcgaaacgtgaatccattttcacggagtctcgtgcacccacggacggtggaaccctaaaatggttccgtgatgtagcctccggcgcggcgccaggttatacaaaatatcatggaaacgtttcacaaatctttataagtacttacttcgcacttgaatttcaatgtggacaaacacaatacaagaaaacagaccaaatatcattgtagagtctcttatcattatatagttgtacaactcagcgagtgttcctattttaacacatttccattttgtctccattttcttctacttctttaaagactgtttcaaatatgatattgtgtaatttatattatttatttgtacttctttactactatacttacttcattataattttatcattgtacaaattattttagcagatttattttaagttaggcagttatttatgagattaaatattattatgtttaaagttgtgcgtaattatatgtgatttggagtaggtctgtgactgttgatatgaataaatgtctaaaactgcatttacgatcaaaacacagtattcatagtacaatattagcgattaaattagatctgaccccgaatttcgcaaattatgacctcagtttatctagaaagaagtttagtgtttttgtgcaacgtacttattagacatattaatttatacattttataccttaacgatatttttgtacatatagctgtattgttagttataatgttgtatgcttgaagttgaactgcctgagcggagggatatgtgcgtacatttgtatcatttatttttataaatttttaactgacacattgtcgaaaaactgtaggttttatagcaaaggaaatagatccttagtatatcgtgtaggagtgaggtgttcggtgtgaatggacgtcccaggttgttgttacatcttatcattagccgtctttaaaatgatcattcattacatagattccacaaacacgattcaagttaatatctgaatgtccaacgtgtatttgaatgaatatttgaaagacggcgatctacgtttaggttgtgaacttgtgactaaacgcacaattttcaattgtctcttgactatacgttgtaaatcatgattacctcttctctgatgtaattgtattattatttatgcatatatattataatttaaattaggttttattactgtaaattgacacatgagattttcagactttccgtgaacagctgcatcgtgagtaagtgaatgaaaagttaacacctttcgactgtattgaaaaaataaaatatttttaaattttaaaaaaaa

SEQ ID NO: 320 - DNA, 950 bp, Plutella xylostella
  misc_feature (1)..(950): Gene targeted: ara; Universal ID: GS887
agcggcgtggcggggggcgcgctgtcccccggcgccggctcgcacgcctccacccccgccgcgccctgctgcgacaccccccggcccatcatcaccgaccccgtgtccgggcacacggtctgctcctgccagtacgacagtgccagactcgccctcacctcctatccgcggctgtccagcgcggcagttggcgtctacggatcgccgtacccgtccactgaccagaacccctaccccagcatcggcgtcgatagctccgcgttctactctccactgagcaacccttacgcgctgaaggaaggcggcggcgagatgtcagcgtggacctccgcggggctccagccgtccagcggctactacccctacgaccccaccctggccgcttacggatacggcgccgggtacgaccttgcggcgaggcggaaaaacgcgacgcgagaatcaaccgccacgctgaaggcttggctgaacgagcacaagaagaacccctacccgaccaagggcgagaagatcatgctggccatcatcaccaagatgacgctgacgcaggtgtccacgtggttcgcgaacgcgcgccgccggctcaagaaggagaacaagatgacctgggaaccgaagaacaagaccgacgatgacgacgatgccatgctctctgatgatgaaaaagaaaaagacgaccaggacgataagctcaaaactcataaagatgacgagcggaaaagcgatgagttactgcagggaatgcatcaccaattattgggatacggaatcaaagaagaggcaaaaagaggaacatccgattgcggagttccgattccggcaacgaagccgaagatctggtcactggcggatacggcggcgtgtaagacccctccccccgcggcggcgccgtggccgcagcacccctacgcgcccgggccgggcgagcgcgcggcgccggacgctggctc

SEQ ID NO: 321 - DNA, 5345 bp, Plutella xylostella
  misc_feature (1)..(5345): Gene targeted: Mef2; Universal ID: GS901
ggtatgtacccacttccaagatatccaatatccgtagcgactccgatggattaaaaaaaaatacgcaaacaatcagatagctgttgacgtccacaccagaagccagccccaggcagtttgctgttgcccccgctccccacaccctctccaagattgctgccaccatgggtcggaagaaaatacaaatatcccggattacggatgaacggaatcggcaggtgactttcaacaaacgcaaattcggcgtgatgaagaaggcttatgagttgagcgtactctgtgactgcgagatcgccctcatcatcttcagctccaacaacaaactctaccaatatgccagcacggatatggacaaggtgttactgaagtacacggaatacaacgagccgcacgagtcgctgacgaaccgcaacatcatcgaggcactaacgaagaaagagcataagaacggagtgatgtcacctgacagccctgaagccgagcccgaatacaacctgaccccacggaccgaagccaagtactcaaagattgacgaagaattccagatgatgatgcacaggaaccagttgaatgggagtcgagtgggagtgggagtcaccgggagcaactacaacttgccagtcagcgtgccggtcgggagctacgatcaatccttgctgcaagctagtccccaaatgcatacctccatcagtccacggccatcgtcatcagaaaccgattcagtataccctagcggcggaatgttggagatgtcgaacgggtacccggggtcagggtcaccgctgggcggcgggtgcacgccgtcgccgtcgcccggcccctccccctccccgcaccgccacccgcacaagccgcatgcgcacgcgccgccgccgcaccactcgccgcggcacaacaacctgcgcgtcgtcataccgagctccatgccgccgccgcaggatgacctttcgtatactggagagacaccactaagctactcaggacttggcaacttcggaccgcaagacttcagcatgggttcatcggacatgatcgggctcacgtggggcgcccaccagctgcagactctacagcacaacagtaatagtttgccagtgctcgggggtgggacgccgccgccggccgcttcgcccaacaacgtgaagatcaaagccgaacccgtgtcccccccgcgcgcccccgaccacctacaccgcgcccccccgcccggcgcgccgcaacccgcacatctttctggagtaattgatggttctgtaacatcgagcaacatgggttcaccagccggccaagacatgcggcattcgagcgccgtgccactagactacgagcagcctcacacgaagcggccgcggatcgagggttgggccacatagctaggccctgaggccttcggatcctatccgaggcccttacacccgcactgctaattcggccgtggcagcgaggcccaaccatccatcgtgacttgccctgaatgtgactgtcattatgacatctggcgccgcacacgggcagtcgcggggcccaatcactccaatggtgctggttcgaaactctgacagtgaattatgaaactagattcaaaggaatgaaggtgcttttcagttttaaaatcgatggcacggctaaaatcaatggaatgtgtgctaaaatggtaacaaaataaaacgaagtaaacttataatgattactaatttagtgttaacgacggaagttgttttcatataagaagtcaaaaccttacatgtatgaatgtccactactttaaatgtactacccttcatatgtacgtaattaatgatatcatgtaatgtaaatgctgcacacaaattgcaagttcactagaaataactgtaagaattaaatgtaagctttctacgtcaatgaagtacaatatttgtccgtttatttatagttgcaatcttactgatcaatgttgaactaatagtacgtaaagtagagtccctgttcccttgtacataagtacttttaatgtgcaaatccgtgccattgtctatttagcctaaacatttagtcaattttagaacaatgactacagcgttgaactaatgaaaatgcacgaaataatcggaaccgttgagtgaaggaactatcaaatggggaggccgagtggtgtaccgaggtgacaatgtttaggatgtgtttaagtgcgttaaagacttaaaatgactgttgacttttgtgttagtgttctaaaaagttttttgtgccattttaaaaataataatagtgtgacatccgaactttgaatcttgtaaattaagtagctaaagttagtgtcatcacacagaagataataaattatatattgtaaaatctattacctatatatctattgacatatttatatacatggaaatcatatacgatatttacataatatgtatacacgtcccgttaggtacgaacgttatgtaattaggtaatgttagctagagatgagtatgtaatataccacacaaagctttaaaatttcttatgataacacttgcactctaagcacttgtaagaaaacacaaacaactacaattattgtataatatcacgtaacaagctaacttactatcgctttgttttcaaagctgatattacttcagtctgcagtagtttcaatgcttcagtttcttacaagatgcaccatcattcggtttattatattatatttatgaacgtttactttttgatgatcagataaagtccaaacgagagtcactcgttcgaagaccaaatattaagtcaattttgaatatcatattataaaattattatacttgttaagtatgttagaaagagttgttttatttagtcacatttttgctacgattattaaattcataatatacctatgttagggcagaatgagtcatagtaacatttttattttgttaatgtgatctgaagagttctttgattttgttatgtaaacctaaaagttaatcgaaatcaacgtagatttttcaataggagaagaatatatataattccataaaggaaatattttaaccttatacacgcatattgaataacatattttggtacagcactttttcataaaaccacaaacacatattttaggaaatattttgtaaccaataagaattatactcctttatccttgttgattccatccaagttcatataacttttatcgcttgcattgcaaaatacctatatgttaattacttattattctatgaaatacacctttttatattatcattgatactacataattttataggataccactagaagtttaatttaacatagagtgttcttcctttactttttcatatcttttcactgtagatgccttactcacagtgcctaaatgtaccacatttataaaccgttttgtaccaaaatttgtaaaataggaaagcaacattttcacacgccctaatattttaagcaactattattattactatactaaataaatctgtatcgttatcaaaatggtaatgcatgtatttgtaatgatgtcagccctagagctgctctaatgtaatttatgagagttttgaccaaatatggtagatttgatacgagtctgcacaatggttttagctagatgttgtatgtactgactatattgaaatttctaggcaacctttagtacatacctattgcgaaaatgtttctaaaaaccttgaatgtttagctactaaattacagttaaactgtaattaaaatttagcataaaatgtgattgttacatagtaagacaatactttgagaatgaagggtttggaaataaaataacataatcgctagtcttatatagacaggaccttcaaatcacagtaacaaaatgaagtagttgttaaaatttgtacagggatgtatccacataaaaatgttcaaaagtctgaactattttcacattgtaaaattggtatacacgtctagaattttaataaaacgaattaatattttaataccggaacgtaatgaatgttaacccatgtttagggaattgtgtaaaaattaatgtacacctttaaatgttgatgtaaattgttgatgtgataaactactactactacttactagtaccattgttgaatccattacttgtacataatatatattctataacttgtacgtgtaaaatgagtttcggtcgttcgttcctaatgagtttctttgttggttccaagttggtaaaatatttcttcgtcaaattattatgtacgttaaatttgctcaaaaagagtttttttagcattttcgtatttttagtggtctgattatgaccttttgaatgtcagacagaacagacataactagaatcttggtgcaaaagtactatcacaattacaaaaatatatattataataaatggttgttaacgataattaaatcatcacaatgaaaatatgtttccaaatagcaaacacggcgtcgcccatgcagttattctatagataataatatatttaatgcatatatcaccaataaaaacatagaagtacattattgctgttacctcatgaatatcccttgcactgatgaccctcttaagcttaatgttcacaataagatatgaagtcaatatgttaagctgatttcagacgttgtttgcacaaatgtaacagtatataaaagtatttcaactaagctggtattgggagcataatttccggggttgtgagctttgcaatcgggaatgagtgcaagattagtaattttaaataaatcttaataatattaaagtaactttatatattcatttttaatacgcacaatagttgtgtttcttgtaaaaagggtttgcttggtttgttttgtagatgtacctatttgtgcatgttttatatcctttgtgttttgtctgtgttgcaatagcaaagagtattaactttattctgttaacttattattaggatgagtattctttgcatttaaataaattgtagtgttaagtatgggtacggatatcatattctggcatgcagtgcagtcttataaatgtttacattttgctattgcttcgcagtgtcctgtgaacaaccctcgtaatgtaaggacttgaatacatatccctttttgaatactcaactagatttcatgatttcacctttaacatcatcagttgtgcaatacaatatttatggaagtgcttattagttagtattaggtatatttttgtttgaatttacaatgaatgcaaaaatgatcatctgttgtattttatcgatatttttactgatctgtataccccgttatctgtacagtgccacaaacttatctgttccggtgacagctcacgtaaatgtgtaatatttcttcactctataagattttaagtttgccagtag

SEQ ID NO: 322 - DNA, 754 bp, Plutella xylostella
  misc_feature (1)..(754): Gene targeted: FA elongase; Universal ID: GS902
ggatttatggataaatatggggatcccaggaccaacccgtggttcctgatgagttcacccttccccacattactaatatgtttaagttatgtatatctagtcaaggttttaggaccacggtttatggaaaataggaaaccttatgaattaaaaaatgttttaatagcatacaacgccttccaagtaatattcagcacatggctcttttatgagagtttgatgggaggctggctgcgtcattacagctttaggtgccaacctgtggactattcagacagtcctattgccactagaatggtacacgcctgctggtggtactatttctccaagttcacagaattcttcgacacgttcttctttgtgctaagaaagaagttcgaccatgtgtcgaccctgcacgtgatccaccacggggtcatgcccatgtccgtctggttcggggtcaagttcactccggggggccactccaccttcttcgggcttcttaacacgttcgtgcacatcatcatgtactcctactacatgttggccgcgatgggcccccacatgaggccgtacctgtggtggaagaaatacctgaccactctgcagatggtgcaattcatcggcatcatggtgcacgcgttccagctgctgttcatcgagtgcgactacccgcgcgccttcgtctggtggatcggcatgcacgccgtcatgttcttcttcctgttcaaggacttctacaaccagtcctacaaggctaagcctaaggtct

SEQ ID NO: 323 - DNA, 5586 bp, Plutella xylostella
  misc_feature (1)..(5586): Gene targeted: Uncharacterized protein; Universal ID: GS892
gtaaattttagcatgtagagtacccgtgaaaatcgttttttttacgaaaaataatgatttaaacagtgatactcgtatatctttttagtgtaaaagacaaaatccatcaaaatggatatgtcggaagtaaaagcgttcaacgcggagttatccgggttgtacgacaacaagccgcctatatcaaaggcgaagatgagtgctatcaccagaggtgctatcaaggccataaaattctataaacatgtagtacacagtgtcgaaaagttcatacaaaaatgcaagcctgagtacaaagttcctgggctatacgtgatagattccatagtacgacagtcaaggcaccagtttgggcaagacaaagatgttttcgcaccgcgctttgccaaaaatatgcaacaaacctttgcaaacctctttagatgtccgcctgaagataagcgcaacataatccgagtgctgaacctctggcagaagaacaatgtgtttggtccagacgtgatccagccgctcatggacatggccgaccccaaccacccactgcaccaggagatacagcagcagcagaatgctaatgggagctccatgaacatcagcaactcgtcagacaaccgcccctcccccggccccgcgcagcacaccccgcagggacccagccccgtcggggcacagttccaggacgactcaaacccccctccgtccggggtgaagttcaaccgcaagttgctgaatgacttcgagtacgacagcgaggacgaggctgaaccaccaccgcagccgcccccgcagcacaccaaccctgctgatgcactgggcagcattctgacgaatcctgagataatgcgacaactgcagagcctgcaggcgcagatgcagatgatgaccggcgtgcccatgcaaaatgtgatgccaatgcaaatggatctacaaatgcaaatgcagcaccaaaatgttgggcttccctttttgagtcagcccgagatgccaaaacagcaagaatccaaagacgacaaggccgagtctgacatagagttcgttgaaactggaccacaagttatagaaattcccgatgccaatgattctagcaggtcgccgtcaccgtcccgccgccgccgctcgcggtcgccgcggcggcgccggcgtggggagcggtcaaggtcaaggtcgcccaggcggagacgagatagagagagagaccgcgaccgtgaaaaggagaaagagaaggacagcgctaagaccagcaaggagcgcgaggcggagcgagagagacagagagagcgggagaagaagggcctcccgccgatcaagaaggagaaccttagtgtgtgcagcacaaccctctgggtgggccacctgtctaaactcgccacacaagaggagctatcggacatgttcggcgcgcacggcggcgtggtctccatcgacgtggtggcgccgcgcggctgcgccttcgtcgtcatggagaggaggagagacgcttataaagccaggcacaagctggacaagcataagctgcattctaaggagattacggtggcctgggcgccgggcaagggcgtgaaagggcgcgagtggaaggactactgggaagtggaacacggagtcagctacttaccgtgggcgcggctgcagcagctgtggcggctcggcgcgctcagcatggacgcgttggaagatggaggctccgtggatgaggagacgctgccgccgtggctgcctcccaggatcctccccaaggtgatggacggccagatgggcctgctcggggccatgccgcccgccctgcccggcgccgcaggtgcattaccgccggggctcagtgccgccaacatcccgctgccgggcggagtgccgcctcagaccagcatggccgctgtgccgccgatgactatgccgccggggatgccgccaggcctggccccgggcatgccgcccggcatccgcccgccgagcattcccggacgagtcggtctgcaagccactagcgcaggactgccgcccactggcccactgctgggcttcccgcccggcatgccgcccaccaacatgccgcccacacccggtatgggcggcatgcccggcttcctgggcgggctgatggggctgggcggcatgatgcccttcggcatggctcaccacacgccgccgccggcgctgccgcaacagcagagcgagacgacccacacggacgacgcgatggatctagacaccgaggaccagggcgacacgccggagaagggggacggggggatctcgctgccggaacagctccaagcgctgctctcgaagccgccgcccatcttcaacagctccgaaccgccgccgccattcaacgcgtccgaaccaccgccatccttcaacaacatgtccataccgccccctgacgacaaggatgatgataagaagggggagagggatagggatagggaccgcagggatagaagggataggggcgatagggatagaagggatagaggggacagggataggagggatcgggagagagatcgcggcgggagggatcgtgaccgcgacgacggcagacgcgacagagacagggatcgaggacgcgaccggcgagacagagacggggcgaggggcgagcgagacagggagactcgcttctccaatagagacaacaacaccgacaaaccccgcgacaaatcgccccgcgccgctaccgaaggcggcgcgcccgagaaaaccctacaagagcgcctatgggagatggccaacggcaagccggccaatcagcagcgagacgacgacaagcccgaccaatcacagccgagcttcgatgcggtacaagatgacgcggtggatatggatgcgaggcatgatggcggcaggcataacatggatatgatgggcagacggccgcctagtctgttgggggatgccccagacatgagtaaacaagacgacagcgggtggacgcagctgccgccgccgcgccccgcgccgccgcacatgccgcccaacttccgagccgaactgagactgaggggacctagagctccggtcagaggaccgtggatgggaccggaagggcccggcaacttcgggcctcgcttcaacggcatgggcccgcctccgttcaaccgaccccccttcgagagaccccccttcgacgggcccccgcgcttcaaccgcatgcccttcgacggccccagaccaccgttcgatggaccgccgtttgatggaccgttcgacggtccaaggccaggcttcgacggaccaccgttcgaaggcgacatgccgttcgatggacctccccgcttcgacggaccaccagagttcttcgacagaaacaaccgccggttcgatgatagggaacaacagtttggggataggggatggaacggcgatagggggaggggagagtgggacgacaggcgccgcgaccgccgcagcgaccgaagtgaagaccgctacagccgcgagcgaggagaccgtggagaccggggtcgcaggaactttgacgacaggaaggatagtagaccaggcagagacgggtccagggaggccgacaaacctcccaaggatgacaaggataaacccatggacatagctaaggaagctaaagaaccagccaaggaagaggagaaggagcgaaggaaggagaggagggaaagagacaggaagtctaggtggggagcccctgaagatgtggtcgtccaacaggaaccccagctcactgaggactcttccacgcaggacactgcaaaggagatgtctgaagtgcaatcggagagtaaattagagagtatggatacgggaatcgaactggagaatgttatgacggaaagcactagcaatgagaaagaaatggctgcgattgaaactgaaattgacaaggaatcaaagagtgccagcagcggtagtctgaacgagaacaaattcggcgaagattcgcaggagaacacgcaatcgtcagctccgtctggacctccgtctaacatcaaagatgacagtgacaaaacagatgaccgaggtgatgacaacacggtggacacttccaccagcgaaggaaactacgcagacgctgagaaggaaaccagcacagaaaccggcaacgaaagagagaactacagccgcgaagacagccaagacagcttgatgagcagcaaagtaccgagcgtagagcctaaagaaatagaaacgccagtggatacgctaatgtcagttgtgtcgtcggaaccggatagcactcgcgacgatagcgagccagtagacacgggctactctgactctaaagctgctcagaaagactcgccgacagagtcatccatagacgacaaagaacaaagtgttgagggctacggatcagacatcttcaccgaagacaagagccaagactccacagaggaagaaaccagggaaagcttagacacggcttgacgaaatacacaaatcaaatttggatatttcctacgataatgattcgggtgacggaccgttcgctccgcctcagccgaggcccagtgttagatgtttattgaataagcaacaccaatattcctttaagtgtaatttatagtaaaccggcgcctatgctagcctgacgccgaccgagtaacaccaaagatgaattttatacaaagatgaaatatatcagtgccttattggttacgatgtggttttttgttcgccaatgaggcaagggagctatatgaaacctttgacagatgatttggtttgtctctcggaggagcggcgactcttcggtgcgacgagaggaacgcgcccgggcggtctagtgagcgacccgggccaggtacggtggctacacatattacattgtatacacgcaacgccgacgggaacaaacgtgcgtttaacttgtttgaatctttattcgaaaaagtgttgccatttcattcattttgtttcgtgattatattcaagcacagtttgtactcgacggtagttatttatcacttgcaatgccgcgtcaaaattgattgtaaacttcacttgtaattttgaacatgtatttcacttgtaacaaggttcgattttgaataatttgctactgtgctaagcttattttgacgcggcaattatcgctagcaatgtgtgcaatcacctcgagccgactgtcacccgaatcaaggatcgttggaagatatctgcggagcgcgaacagtaccgcgcatcactgcaactgtagttagctcttaggcggaactccatttagttttattattgtagatgtcggcacacgacagataggttttaatttacttgttttactatttactcttactatgtggtggttagctgtaacttgtaaactatgcttagttgttttctcttcatgaatatatcaaatttataatatcccttcagttgactctaacctcaataaggtttaaaaattaacatgaaattgtaacaaaattatcttactgcatattttatcgatcgatataacacttattggaataaatctagccaattgtagtcattcatcacatttaatatgcttaggttattctgataattagatgcggcgaagctatgtatatgtttgagaagattgtttatatgtatatgtaacgtaacataaaaagctacatagggact

SEQ ID NO: 324 - DNA, 1055 bp, Plutella xylostella
  misc_feature (1)..(1055): Gene targeted: Translocase of inner mitochondrial membrane 23; Universal ID: GS905
tgacattgactgacatgacatttgacaattctaaattccttttcgtctcgtccttcactatttccgaattacaagtttacgtagaaaacccatagttttattgaattaaagatgtctctgtttggtgatattcttccgttgggcaaacatgaggagaagcagagccagggctcgggcgcaggactctctccgtacctgaactttgatccaaactatattccaaaaatgcagccagaattcctgtaccctgacgatagtcatatggccacaactgccaggaggtccaacgtcgcactacccatcattgggatgtcgttcatgacaggttcaggtcttggtggagtgacaggattctacaaaggtctgcgagccactaccctggcaggacagagtggcaaaattcggagaacacaaattgtcaactacatcatgaaacatggaacttcaactggctgcactcttgggatcattgcctcattctactcatgcattgctctgggagtgacctgggtgcgggacaaggaggacaccaccaacacattcctggccgccgccaccactggcctcatctacaagagcaccgccggcctcaagtccatgggcctcggagcggccgtgggcctcaccctcgccggagtctacaccctcgtcaccgacaatgacaacatatggagcaaagcccaatacaaccgattgtgatcactctatcccaaaaaagattcagaactattttctttacatagctcttattgtagggttatgtgaataacatagatttaatttaataattagccatatttaggacttatgtacataataatagactgttatttttagtttatgttaatcaacgccaaaggatctgttacatgtattggggcttagttattccatgtttcggtactactaatagtccacaggcacagctgtacatggtaagcctgcacgttgtttgaatcgcctatcaattgcaggagtagcacaatttataataattataaatacttaagcttgttaaattttaaataaaacatattttagaaaataaaaaaaag

SEQ ID NO: 325 - DNA, 3106 bp, Plutella xylostella
  misc_feature (1)..(3106): Gene targeted: Pax2; Universal ID: GS891
cgccggcgcggacaccggcatggcgtccgtggctgcctggctgccgttcgcccgcgccgccgccatcggctgggtgcccatcgccacgcacccgctgccgccgccgcccgtgcccaaggaccgccgccgcgccgaggacgagaagctactcatcaacgtgtccggccgccgcttcgagacctggcgcaacacgctcgagaagtaccccgactcgctgctaggctccaccgagcgggagttcttctacgacgaggactcccgggagtacttcttcgaccgggaccccgacatcttccgccacatcctcaactactaccgcaccggcaagctccattaccccaagcacgagtgtctcactggctacgatgaagagcttgccttcttcggcattctccccgacgttatcggggactgttgttacgaggactacagagataggaagcgggagaatgccgagcggctcatggacgacaagctcagcgaggcgggcgaccagtcgctgccgcagctcacggatctgcgccagaagatgtggcgcgcgttcgagaacccacacacgtccacggcggctctggtgttctactacgtgacggggttcttcatcgccgtgtcggtgatggccaacgtggtggagacggtcccgtgcgggcaccggccgggccgcgccggcacgctgccgtgcggggagcggtacaagatcgtgttcttctgcctggacacggcgtgcgtgatgatcttcacggcggagtacctgctgcggctgttcgcggcgccggaccgctgcaagttcgtgcgctccgtcatgtccatcatcgacgtggtggccatcctgccctactacatagggctgggcatcacggacaacgacgacgtgtcgggcgcctttgtgacactccgagtgttccgggtgttccgtatcttcaagttctcgcggcactcgcagggactccgcatcctcggctacacgctcaagtcgtgcgctagcgagctgggtttcctggtgttctcgctggcgatggccatcatcatcttcgccaccgtcatgttctacgcggagaagaacgagcaagacaccaacttcacatctattccggccgccttctggtacaccatcgtcaccatgacgacgctcgggtacggcgacatggtgcccggtacaatagcgggtaagatcgtgggcggcgtgtgctcgctgtcgggggtgctcgtgatcgcgctgcccgtgcccgtcatcgtgtccaacttctcgcgcatctaccaccagaaccagcgcgctgacaagcggaaggctcagcggaaagcgcgtctggcccgcatccggatcgccaaagcctcatcaggcgccgccttcgtctccaagaagaaggctgccgaagcccgcctggctgcccaggagtcaggcgtggagcttgacgacgccggccgggacgaagacatcttcgagttgcagcatcaccatctactgcgttgtctggagcgcaccacggaccgtgagttcgtggaaatagagaaccctttcaacggtgcggccaagcggccggggtcaccgtccccgatggcgtcgccggcccactcggggcgcgcgccggcgctgctggcgtgctgcgcgcgctgcggctgctgcccgcagaagtatcagatatcaaaatgctgaaactacagtcgagattccggaaaaaaaccatctgacaacccttcagaactttagtgacaatgtgacttaaaagtgacaaatctgtcagactaacacaaaaagttccctaacattcaagaatactcctcaaattctcttcacacgctagttataaatttagtttaacaaaccacaacaaaacaacaattaaaagtgccaataacagtgcaaaaacaactcaagtgtcaaaaaaactgtcaaaagtccatcgacctccaacgattcaaacacgtgccagaattcgaattgccagttcgaatttagagttcggaattcaaattttagttttgtcaaattgtgccagtgtcacgtgatggatctgcacgcgcctcagctggtggtacatgggtacgagccacatgcccctctgttggaggttgagggtctggaccctcacagtcctcagcagaaggtgctcatccacgctccaaccatgcagggccaggatatgatgggcaatgaccatcggaacggagattacggtttcacagatgagcagtacgcgcacgggagcaaccagagcagtgatggtcacggaggcgtgaaccagctcggcggcgtcttcgtgaacggccgaccgctccccgacgtcgtgaggcagaggatagtggaactggcccacagcggagtcaggccgtgtgacatcagcagacagctcagggtatcgcatgggtgcgtttcgaagatactatctaggtattacgaaaccggcagcttcaaagccggcgtgatcgggggctccaagccgaaggtggcgactcctcccgtggtggacgccatcgcagcctacaagagggagaaccccaccatgttcgcgtgggagatccgggaccggctgctgagcgagggcatctgcagccaggacaatgtgcccagcgtgtctagtattaataggatcgtgcgcaacaaggcggcggagaaggcgaagcacgcgcacaatcagcagcagcagcaggagcaggagatcagctcggcgcagggcagcgtggtctctgtaataacccatgcaggcaacgcgcccggcgccacctccgtcctgtctccggccggcaacgagcaccaggtcaccaactctggcagctacagcatcaacgggatcctgggcatcgagcaggtcgaggggttgcacaacggaggggggctgaagaggaaacggcatgaggagcaagatgagaatcgagactttaatagtcattcggaagacgatgtgaagagacagagaagtcattataatggagaccaaatatattctaatctctggtcatcatcgaaatggacgttaaaggacgagtacaagttgctgtcggagctagggggcgccactgcgacggcggccacagggtactacggcgagctgttcgatgcgccctacgagcacgccgcgcatccacactatactccacattctgcaat

SEQ ID NO: 326 - DNA, 1566 bp, Plutella xylostella
  misc_feature (1)..(1566): Gene targeted: Vrp1; Universal ID: GS893
ccacgcgctgctcggcccggccgccgccatcgcctccccgcgcgccgcgccgcccctccccgtcctgcccatagacgagctacagatgccggccacggacgtcggagatctacgcgatgtagtcgacgccatcaacaagctgtgcgatgacatgaagacgtctaccttcgacgagggagtcgaagaggaaatgacagaacaagctgaagttgagctgcaccgttacgaggaaacagcggaacaggccaggcaggtggaggaaacgtccgagcagactcacgtcgaggtgacgcatcagtacgaggaatatgtcacagaggacaaggtggagacgcctcaatacacggagtatcgagacgtggagctggtgaacccagaggatatatgcgtgcagcgcgtggagacctaccacgccgtggaaacgtaccatgcggagcgaacggaaacgtacaatgcggaacgtgtcgaaacgtacaatgcggagcgctggagcgactcggcgtcgcaactatcagtcccggacgtgacgtcagacgcgcctgcgcacgaacccgtcagcgaaatgtacttcaccgcgtcctccgaagtctctctcctctctgatacagaactccctgaccgacccatggaggattccatctgtagtcaggagaataaagatgagaggaaggaggtcgtgattgctggacatgtggcggcgatgagggagcggtttgaaagcatgacccgtgccaacactccctgtcctgatctgctgcgctcgctgtcgccctcgctcgacgcaatccggggtgccacgcccgaacccgacctagggtagactgtaggtgaaagaagtagagctggactagggttgtcaccggggtgaaatgattatcagattagcgccagtcgctgattgctctgggtgggccggacgtatgttatgtatgtaacgtagtgggttgggtagtctttcggggtgacactttcctttgcacccctggcgtcaaagtgtgatagataatgcattatgttcttagcaatattaggcagtgtaacctgcacggttgattttctcctcaattattggtaataattaaataaataggggaagactgataggggaagcgtagcgtcggatgttaggtataataaaatcataaggaaatgtgattgagtaacttgtaggtacgtattgtagtaggtataatttgtataatgttaatcagtattcattactcacgttattctgaatcattgctagtcgtcgttcatgtatttaaccatctgtaaaggacgtgccaataagggtgtgttcacaaatagctaagggttgtgaattattttgtagcttcgctctttttataggaaatactactagtattattctaaataaatagtactaacgacttggtacatatcgtaaaattactcgttaggtactgttagcaatatatgtaaatcttaaagagaatgtgattgagtaacttgtaggtacgtattgtagtaggtataatttgtataatgttaatcagtattcattactcacgttattctgaatcattgctagtcgtcgttcatgta

SEQ ID NO: 327 - DNA, 3904 bp, Plutella xylostella
  misc_feature (1)..(3904): Gene targeted: dre4-CG1828; Universal ID: GS886
aagttggcaacatcgccagaatacgtggcccgtgtattttctgtgtgaatttcgtatcttgtttatattttttattgcaattattcacttataaatagcccaaaaaccgtgaacaagttgccagtacaagatgatgaatccacagttcatgcctcctgggcaaaacaacaatgcaccaaccaacccacttgggtatcctccatcatcacaagatattaatggtcaccaaaaccctaacatgtatagccagatgccaagcaatggacaacccatgccaccaatgaatgacatggcacagaagatgcaaggcatgaacttaaacgggcctcaaggattcccgccttcccaactgcctcccggtcagatgccgcccggagccaacttccctccttcttcaaattttgggccaggccagggccccccgggacaaaggcccggtgcaagctatccccctggtaggcccggaggccccccacagcagccgcaaggtccacctcagatgcccccgagctccaccccgcatggctttgctcccccaagtcagggtgctgatcagaataggggctacatgccacctcaggggcctccacagggcatgcaaggacctcctaagccaatgcagccccctagctctcaacctagtcaaatgggcccaccacaaatgggtcaaccgggtatgccaccgcagcctggcttccagggccagcccgggcagcagaccccgcagcccggcatgatgcccccacagcagcggcagccggggctcccgccacaacctggtcaacctcctcagcccgggcaacctccacagaacatgcctccacagcagcagatgcccggtggcccgcagcccggcatgcagcagccaatgaagcctccaatgcctcaacaaggccagcctggtttgccaccgtctggcccagggctgcctccacagcccggccagccagggttaccacctcaacctagtcagtccggtctgcctccccagccagggtacccaggccagcagggcatgccgcagccaggacagatgccgcctcggcagggtcctccacagcccggacaaatgcctccatcatcacaacctgggttgcctcctcagccggggatgcctccgcagcctggaatgaaccagcccgggctacctcctcaaccaggcatgcctccacaacaaggaatgaaccaacagccaggcatgcctcctcaacctgggatgcctccactacccgggatgcctccacaaccggggatgaaccaacagccaggattgcctccacagcccgggatgcaacagcatcaacaacaacagttccagggccagccgccgatgccggggttgccgcacatgccgccgccgctgtcgcagcagcgccagtacccgcccgcgcagcaacccgcacagcagtacccgggcatgcaacagcctcaacccggctaccccccccaacagcagccgggctaccccccgcagcccgggtaccccccgcagccgggctacccgcagcagggcgcgttccccgcgcagcagccgagccacccgcagtatgggtaccagcagccgccgcagaagaggctggacccggaccagatgcccagtccgatccaggtgatggcggacgaccagcagaaccgcggcggcgtgttcgtcaccaacgagaaggggctcgtgccgccgctcgtgacgactgacttcattgtggacgataaggggaatgctagtccccgctacatccgcagttccatgtacagcgtgccggttactgctgacctgctgaagcagaccgccatgcccttctgtctcgttatatccccaatggccgaaaccgtgggcacggaacaagagccccccctgatagacttcgcggcgctgacggggtctcccacgctgggccccgtgcggtgcgcgcgctgcaaggcctacatgtgccccaatatgaagttcgtggacgcgggacgccatttcaagtgcgcgttttgtaaggcgcagactgaagttccgatggagtacactcaatacatcaacagcatgcagcagtacggtcgagttcccgccgagatggcgctgggggcgtatgaaatagtggccactaaggagtactgtcggaacaacacgctgcccaacccgccggcgctagtgtttgtgatcgacgtctcctacaattccgtcaaaaacggcttactcgagaccctgtgcgacaacatcatgaccatcatacagtcgatgccgacggacgaggccgggcgcagctacactcgcgtcgggttcatcacgtacagctctaccgtgcacttctacaacatcaagggaacgcttgcgcagccgcaaatgttatcagtgggcgacgtcggggacatgttcgtgcctctactggaagggttcctggagcgtcctgaagacagcggccccgtgctgcagcagctgctggagatgctgcccgtgctgttccgcgacaaccgcgacaccgagaccatcctgctgcccgccgtgcaggcgggtctagaagccctaaaagcagccgacacgtccggtcagctgctggtgttcaacaccacgctgcccacctaccccgcgccggggaaactgatcaacagagaggacaggaaactgctggggactgataaggagaaacagatactggccccccaaaccacggactacaacgagctgggccaagcctgctcggcggcgggagtgtgcgtgcagctgttcacgtgcaacaacgcgtatgtggacgcggcgacgatagggcagctgccgcggctcacggggggacagacgcacaagtacacgtacttcactgcggacgtggacggcccccgtctcatccacgacgtggtccgagtcgtgtcgcgccccaccgcgcacgacgccgtcatgcgcgtacgttgttccacgggggtcagagccacggagttctacggacacttcttcatgagtaatacgacggacattgagctcgctgctattgatgcggacaaagcagtcggtatcgagatcaagcacgacgacaagctgacggcagaagacggagtctacatacaggccgcgctgctctacacgcacaggagcggtcagcgtcggctgcgagtcctgaacctggcgctgtcggtggcgcagcagctcgccgacacctaccgcagcgccgacactgatactattgtcaacttcctcaccaagcaagcaatctgggcgctccgcgagacccccccgcggcagatccgcgaaggcctgacctcccgctgcgcccgctgcctggccgcgtaccgccgccactgcgcctcgccctccgcgccgggccagctcgtgctgcccgagtccatgaagctgctgccgctgtacaccaactgcgtcatacacggcgacgcgctgcacggaggctcggacataacgtgcgacgagcgagcatgtgccatgtaccgcgcgctcaccgcggacgtggccacgtcgtgcgcgctgacgtacccgcgcctgctgccgctgcatcgcctgcgggagggggatacaccggccatgctgcgcgccagcaaagacaagatggaggaccaggggatatacctactggagaacggcgtgcacatgctgctctgggtaggctcggccgcctcgcccgagctgacccaggctctattcggccagccctccccccaggccatagacacgagcgtgagggagctgccggtactggataatgagctgagcgaggcggccagggagctggtcgatcaggcgcggcgccagcgcagggtctacatgcgggtgagtggatgagttttgaaatcatcaatgaggcgtatggtggtgagtcatcacatcatcacaacccagcacatccccactgctggggcacgggcctccttctatgaaggaatggttttaggcctggccacgctggcctagtgc

SEQ ID NO: 328 - DNA, 2875 bp, Plutella xylostella
  misc_feature (1)..(2875): Gene targeted: Dhx15; Universal ID: GS896
aggagacaaagttaaggtgtaagtgttgtcggtgacgggacagaaggtgtctctgacaatgaaggacgtctgccaggagaccggcaaggacctcaaccccgcctcgcacgcacacttagatccggagcagtcggggcgcaacccggaccgtccggcgccggcggccacggtgctggcggggctgcccggcgccgtcgacgcggacgaggacgtgagtcgcaagcgagtcacgcggatctcgtcgccggagcgctgggagattaagcagatgatatcatccggcgtcatagacaagagcgagctgccagacttcgacgaagagacaggccttctacccaaagacgaagacggcgaagcagacatcgagatagaactagtagaagacgaaccgcccttcctacaaggccacggcagggctctccatgacctgtctcctgtgaggatagtgaagaaccccgatggatcgttggcccaagccgccatgatgcagtcagcgctgtctaaagaaaggagggaacagaaaatgcttcagagagaggctgagatggagagcgtgccgactgggttgaataagaactggatagacccgctccccgaggacgacgggcgagcgctcgcggccaacgtgcgcggcgccggcgtgcccgcgcaggacctgcccgagtggaagaaacacgtgattggaggcaagaagtcctccttcggcaagaagaccaacctgtcgctgctggagcagagacagtcgctgccgatttataagcttagggatgagcttactaaggccgtagcagacaaccagatcctaatcgtcatcggcgagacgggctcaggcaagaccacgcaaatcacccagtacttggccgagacgggggtgcgagcgagaggcaagatagcgtgcacgcagccgcgtcgtgtcgccgccatgtcggtggccaagagggtggccgaggagttcgggtgtcggctcgggcaggaggtcgggtacaccatccggtttgaggattgtaccagcccggatactgttatcaaatacatgacagacggcatgttgctccgagagtgcctgatggacctggacctcaagtcgtactccgtgatcatgttggacgaggcccacgagcgaaccatccacacggacgtcctcttcggcctgctcaaacaagccgtccagaaacgaccggaactcaagctcatcgtcacctccgccactttagacgctgtcaagttctcgcagtacttcttcgaagcgccaatctttacaattcctggacggacgttccctgtcgaagtgttgtatacgaaagagccagaaacggattatttggatgcgtcgttgataacgtgcatgcagatacatttgagggaaccgccaggggatattctcttattcttaacgggtcaagaagagatcgatacagcctgtgaaatcctctacgagcgaatgaaatctctaggcccagatgtaccagagctgatcattctgccagtatactcagctctgccttcagaaatgcagaccaggatcttcgagccagctcctccagggtccagaaaggtggtcatagccacgaatattgcggagacctcgttgaccattgacggggtgtactatgtggtggatcccgggtttgtgaagcagaaggtctataattcgaagactggaatggattcgctggttgtcacgcctatttcacaggcagcagcaaaacagcgggccggtcgcgccggtcgaacaggacctggaaagtgctaccgactgtacaccgagcgcgcctaccgggacgagatgttgcccacgcccgtgcccgagatacagcgcaccaacctcgccaccactgtgctccaactgaaaaccatgggcatcaacgacctcctccatttcgacttcatggacgcgccgccggtggactcgctcatcatggcgctggagcagctgcactcgctgtccgcgctcgacgccgaggggctgctcacgcgcctgggacgtaggatggccgaattcccgctcgaaccgaacctctcgaagatcctcatcatgtcggtagccctacaatgctccgacgaaatcctcaccatagtgtctatgttgagcgttcagaacgtcttctaccgacccaaagacaagcaagcgttggccgaccagaagaaagccaagttcaaccaagcggaaggcgaccacttgacgctactagcggtgtataacagttggaagaacaacaagttttcgaacgcgtggtgctatgagaacttcgtgcagattcggacgttgaagcgcgcgcaggatgtcaggaaacagctgttggggatcatggatcgacacaagctcgacgtagtctcagcgggcaagaacacggtccgcattcagaagacgatctgctcggggttcttccggaacgcggccaagaaggacccgcaggaggggtaccgcacgctggtggacagccaggtcgtgtacatacacccgtccagcgcgctgtttaataggcaacctgaatgggtaatctaccacgagctggtgcaaacgaccaaggagtacatgcgcgaggtgaccacgatcgaccccaagtggctggtggagttcgcgccggccttcttcaagttctccgaccccaccaagctgtccaagttcaagaagaaccagagactcgagccgctctacaacaagtatgaggagcccaacgcctggcgcatatctagagtgcgccggcgcaggaattagacggttatttatgttatgttaagtgaagtatgtattgagtgaaaaggaaaaaaaacaaaataaagttttagttttaaggaatgcgggttttattatacttacgttatgtattagtctatgggtacttatttgaagatccgaaaaattgacgacgag

SEQ ID NO: 329 - DNA, 3041 bp, Plutella xylostella
  misc_feature (1)..(3041): Gene targeted: CG40470; Universal ID: GS888
cagccaattgctgctccaattgagggctcccgtgcgagccagtaccgagtggcgggaccagggcaccacagatcgtgcaaggattggtttccaagatggttttaaaaatatcgatgtatctgtgctggctggctgcggcgatgtccttaccaccggataagatgcgtccgttccacatcatcaagactcggagcatcgacctcaacaacgctcacgggctggccatggagtctcgcctggagaaggcagtggtccccacgggctatcgactggagttagagccttacttggaagatggggtgttcaaggggcacgtgagcatcaacatcacgtggctggaggaatcggacgaggtggcggtgcacgccgcgcacgacatcgagatcaccaacacggagatccgggcgcaggcgcctgacaccaaagaagtcctgaagctcggcatccggcgcgccgacagtgacctgaagaagcccgtctacaccatccgcctggacaaggccgtgcccaagggctccacggggcacctggacatcagcttcaacggcaacatgcagaccgccgtcaccgaggccttcttcaagactacctacactaatgagaatgaggaggagaccatagtagcagcgacgcagctccggcccaacaacgcgcgccgcatgttcccgtgcttcgacgagccggcttacaagactccgttccagctgagcgtggtgcggccgcgcaccatggtggcgctcagcaacatgcccgtcgcgcgcactgaggacataactggagagccgaatgcagtgtgggaccacttcgagaccaccccctccatgtccaccttcaccctcggcctcgtcatcgcggacctcaagcaggtcggcagccccgctgtttacaaggacgaaaatggaaataacttggagctccgcgtctggggtcgccaggagttcctgcccgccctggagggggtccccgcgaaggtgctgcgagtgttcgccgaggtctccaaattctggcaggtgccgctcccgctgcgccgcctggacctggtggcgctgcccaactaccagggggtcaagcctgctgacaactgggggctgattgtgttcaaggagagtgacctatccagccgtggctacctgcaactagcccaggagttgtcctaccagtggctgggagcactcaccacgcccgcctggtggaccgacgcgcacctcaacaaggccctggtggggtacctcgctgctgagaccgctttcaagataaacaacggctccgaaatggagggcaaatggccgatgacggtgctctactctctgtactacgagttcagcaagcgctacccgcactcgcgcatcaccggcatgaagcaggagaccacgtccaccaagatcgagctgctgttccgcatgttcaactacaccctgggcggggacacgttcaggaaggggctccggatgttcattgagactagcaaattcaagacgttcaccggagacgacatctggcaagcgctgaacacggcggcggtggccgacggtcggatccccaaggacatcgacgtgaagaccatcgcagagagctggatcaacaaggaccggctgcctctcatcacggtggagaggaactatgagagcaactccgctttgatctggcagaaagtgtacctacgcgagcgtccgcacgacgtgcccgacgcaagccgcatgtcgtggtgggcgccgctggtggtggctcgaggggaccagctctccttcaccaacaccacgccagccgcctggatgcggaaccacaaggatctgaacctgataaatatgccgagcaaggagcacttcattattgtcaatccggaggaaattgcacccatccctgtaaactacgacaaaacgaactggaacctcctactcaccttcctacaaagcgagaacagggttcaaatcccggagttgactcgcgcaaagttgctgcacgacgcgtggaacttggcatacgctggggaactctcgtttgccactgcgttgaacatgacactgtttctgaaggaagagaagcatcacctggtttgggaccccgtgttcaccatgatcgaccacattgggaagcacatttgcgagtgcatacatgcgaaattccaggcctacgtcagaacgctcctgacgccgctctacgaggagctgatgaagaacgtgaaggaagacgaggagaactggaggaagaatctgcggacgctgaccaagaacttcctgtgtcgcgccggctacgagccctgcgtgacggaggcgcaggagcagttcaagaagtggatcgtggcccccaacccggatgaggggaacccgatcgcaaaccagtacatctgcccagttttcaaatggggaaccaaggaggaatgggagtttggtctgcaaagagttatcaacttcccgccttcaaggaagcagagtgaacgaacataccttctgaaaacactggctggttgcccggtagatgaatccaagatcataagactgctgaacttaactctgctagaaggaaacggcaacttcactgagactgaccagttccttattctgagcatgctgagtggaagccctcaggggtacaccaccctcttccacttcctccacaacaactggcaggcgctcaagttgaagtacaccagccaaaccactctctggaacagtctgatcaccgctgccacctcccagttcaccactcaggaaggcctggacctggtctccaagctcctcgtagaccatcagggagaattcggctccgctgaacacatcatcgagaagtccgtcagaaacatcagggtcgaagccaagtggtccgccgagaacctgccagtcatagagaaatggctcgacacttacctcgagaatgacaaggaaatacaacgcaagggttagatggtgatgttggtgaaacaggtgtagttgtaagcgtacttttctattgaaaagaaagtctttagtcattttgtgtaatgccagtattgtcttttgctactaagtaggtaagtacttccatatacatcgtggaaactgtat

SEQ ID NO: 330 - DNA, 2571 bp, Plutella xylostella
  misc_feature (1)..(2571): Gene targeted: Rpl40; Universal ID: GS927
cgttcgtaatgacgtttgtgcttcgattttctacatttggcaaaacattaatttactgagataagtgtttgccgtgcgcattcagtgagaatacgcggggggcggatggccgcatcgtcgcgatcaaaacaccgcagccatggctatgtctaaaggttttaaagtgctcgagaaatcttctcccccgagtccgtacagtataatccttcagcacaggaataaagatgcgtctctgttgttcgagtcgaacgcggtggtggcgctgtcgccgcaggagctggacacgctgaagaagcagtaccacaagatcgcggaggcgtacggcgtgctcggcgtgctgcagctcaactgcggggactcatgcctgctgcacctcgtgctggtcaccggctgcacctccgtcggcaagatccacgacgtcgaggtcttcaagatcacccagacgcagttcctgcccctcttccaccaatcacagcacgatgacaaaatgtccgaagtcagaaagctgctcaactctggcacattctatttctcgtggaattccgggaagagcaacgacagtctgttcgatctcactctgtgtgctcagaggaagagtaaaggagctgcgccagacaacaggttcttctggaatagaactttgtttatacatcttatcagatatggtatagattgtgatgaatggctgactagagctatgtgtgggtcggtggagataagaactatctatgtggggcacagacaggcccgtgcatgtgtggtgtctcggctcagctgcgagcgcgcagggaccaggttcaatgtacgcggctgcaatgatgatggcaatgtggccaactttgtggagacagaacaagccatctatattgatgattctgtgacatcctacgtgcaaactagaggctcggtccctctgttctgggaacaaccaggtattcaagttggatctcataaagtgaagatgtcccgaggctatgacgcgtccaccagtgcatgcgagaggcacttcacccagctgaagaggaactacggatcaatgatcattgtgaacctgctgggctccagcatgatcgggggcagcgaaggggaggccacactcagcaatgcattccaaaagcatttgaatgattccccgcactccgacatcacccaaatcatctttgactaccaccaggaagtgaggggtgggtctattgagactgcactagccaagttcaaaaagattattgaaaagtattatgatgaaattggaatattcagttcaaaaggtaatgatatctacaatgtgcagaagggatgcatcaggaccaactgcctggactgcctggaccggaccaacgccatacagaccttcatcggcctggagatgttgagtattcagctcatgctgctgcagtgcattgacaagaaacagaatgtgacaagatttgaggaagtattcaaacaaatgtgggtgaataatggtaatgaagtctcgaaaatatatgcaggtacaggagccatccaggggggctccaaactcatagatggagcccggtctgccgcccgaaccatccaaaacaacttattagacaactcaaaacaagaagctattgacatactgctccttggctccaccctgaattcagaactctcagacagaactaggatattgttaccatcaagtattctacacacatccccatctctactgagggaaatggtgagaagacaaaatgaatacacagagccatccaacatccgcatcacgatcggcacctacaacgtgaacggagggaagcacttccgcagcgtggcgtacaaggacgtgtcgctggcggactggctgctgcactgcccgcgctcctcgctcgtcgacaccggggacgcggccgaccacccctccgacatcttcgcgataggcttccaggagatagtggacctgaatgcgagcaacatcatggccgccagttccgataacgcaaaagcttggagtgaggagctggagaaggttctgtgcagagacgcgccctacacgctgctgtcgagccaccagctcgtgggcgtctgcctcttcgtgttcgctcggagggacctgatcccgcacatccgcgacgtggcgctggactcggtgaagacggggctgggcggcgcgacgggcaacaagggcgccgtggccatccgcctcgtgctgcacggcacgtcgctgtgcttcgtgtgcgcgcacctcgcggccgggcaggcgcaggtggcggagcgcaacgccgactacgccgagatcacgcgccgcgtcgccttccccatgggccgctcgctgtactcgcacgactacgtgttctggtgcggcgacttcaactaccgcatcgacctggacaaggacgagacgcggctgctggcggcgcagggcaacctgccgcgcctgctcgaggccgaccagctgctgaagcagaaggcgcaggacctcgtgttcaagaactgcgtcgagggggagatcacgttcccgccgacctacaagtacgacctgttcagcgacgactacgacacgagcgagaaggcgcgcgcgccggcgtggaccgaccgcgtgctgtggcg

SEQ ID NO: 331 - DNA, 2732 bp, Plutella xylostella
  misc_feature (1)..(2732): Gene targeted: Rps21; Universal ID: GS937
gacctcggcccggtcatactgtccatcaaacaggagacgctcaattcgagggatcagttcagttaagtttggcgtctgcctgtacgcttttatccgcaagtaggatcctggtgcgggccatcagctacacggtccacgggctgatcccggcgtcgtgcgtgttcgcggaccgctacaaccgcgaggaggtggtgcgctcgctcggcaaggaggtcaacatcaacccgccgctcatgctgggccagctgccggatacgcccgaggaactgctcaagttggaccaggtgttcataaagtcggagctgaaggtgggtgtgatcttcgtgaaggaggagcagagctcggaggaggacatcctcggcaacaacgagaactcgccgctgttcgacgagtttctgcaggtgctgggggacaaagtgcggcttaaaggcttcgacaagtacaagggcggactggacactgtccacgacctcacgggattatactccgtgtatacgaactggcgcgggatcgagatcatgttccatgtgtccacgctgttaccctacgagcggcacgaccctcaaaagctgcagaggaagagacacatagggaacgatatcgtctgtgtggtgttcctggaagcggacaatactacgttctcgcctgcctgcattaagagccattttctgcatacgttcattttagtgcgggtgtcggcgcggatcaagcggcgtcccacgcgctacgagatctccgtggtgacccgggacgaggtgggagcctacaagccctacctctgggagcagagcgtgttcgacaaaggcccaatgttcagagagtggttactaacgaaaatcgtgaacggcgagcgagcttcgtactctgcgcccaagttcgcgcgaatgcaggaacgaactagaagccagatgctggaagacatagtggccaacctacagaaccatgcggagacggggcagatccccaaaccttatagaagaggttcatggcgccctattggccacatgcggccttcttccccgcttctggactcagtgagagatcagttcgaagactacgaccaactagccaaagatttcacgagagtgtttctgaatagtgacgcgaatatatcgataaatgcccagctgttcgacgtggtattcttagtggggcagtcgaagcagaagaccaagtttatcggtgtgagagctattttgggagttcgcagcagggtgttccaagagatgctgtacggcatccagacggggttcggctcgccgcaggtgccggtggcggagctgctggcgcggccggcgcccacgctgctgtcgcccacgccccgccagaagagcagcaacttcctgcaagtgcccgatattgagtcgccgaggccaaaaagtgtgccaagttcgccgatggtgaagcgagcgttttctcgcctgggcaccatcacggccggctggggaagatctatacggaagcaacactcccacctcagtgcagaggataagaagaaatgggccagctcacaggattgctctaataaagaagcaaaagacaaagaaaaggaaaagaatgctgccctagcggttccaagactatccgtatgcgccgacgcacagaaagttgacagagccaaactagcacagactgagttctcaataatcgagttcgaccctgaaacattccgcatcctgctggactacctgcacacgggcagctgcccgctgacctgcgcctccatcccggggctgatctgcgcggccgagcactacgacctgcccgagctgctgcaggcctgcttccaccacgccaagcagttcctgaggatagaagtggtgtgcacaatgctgatatcactggagaactactactggcggtacacgtcggcgtcggagctggtgaacatgatcctggcgttcgtggagcagcgagcctccgcgctgttccagacgcccgagttcctcaacctgtccgagtccatggtgcagatgatcatgtgccgcagcctcgaggtgcccgaggtccgcaagttcgaggcgatgctcaactgggcgcgcaacaagatacagaagtctaaatcggcgacaacaaagactgacgtcaagaatgaattcaaatgcacgatggagcggctggcgcgggacctgaagctgcaccggatctcgccgcaggagctcatcaaggtggtgctgccgtcgaaggcgatcaagaacgagaggatcctggagacgctgatgtaccaggccaactcgggcatgtaccgcatccaggacagctacatcgaggcttgccaggagcgcctgcagaagcaggactcgcgcttctccgaatgggaaagcttcgactacggggtctgagcggagctgtgaggaatatcagtgtattagatagatatataaacagtgactgggtacctccttctcacattgtggtatgttgacgccttctaaagtattattgttattaatgtactcgagtagacgagcgagaaaccattgtacacttctcgtatattccttgttgttgtttattgatacctatattttttacatgtagtcgtgttcatcaatattcatctctattttttgtaataaccacgtttgacatgtttggcggaattgcaataagaattgtcattgctggtacaaaattttatatcccttctgtgatccacaatagtgagaacaaatataacatttataaatatgaatctagcaagagaatatacctaacataatgatgtaccc

SEQ ID NO: 332 - DNA, 1189 bp, Plutella xylostella
  misc_feature (1)..(1189): Gene targeted: RpL3; Universal ID: GS938
tgtagatatcgatcctgttcaaagtgagagtgacgtcacggacgcgattcgagacagttgcttgtggaacctgtgttcaaattaaaaacaaaaaactgtgtaaagagtgaaaattctttaataaacttagcagaaacttatagtatatcatattgcgcgagttataaactatacagattgagacaaagttgtgttttaagtgcaaatttagtgcaaattcgattgttcaccagtattgtgcggtagtactaccccgtgtttttgtttacgtttttgcggtcagctgtttaaaaatcagctgttgttagacagctgtcgctgtcacttgtcaaacaagagcaccatctagtggcgtacttaagaacttcaaggtatactacattgtacgaataaaatggcaaacaagtgcaccagttgcggaaagttccactcatcgacagatggcgttgtttgtgggatttgcgccggatcatttcacagggaatgcgcaggattgctagagggcgtcgtggtcgctgctgactgggcctgcctcaactgtaagcgtaaacggaggcaaagcaactacgatgacacgccagtcaaaggtgctgcggcgccatatgatgcaaggaagcaaactgtggaaatgctatccacctccggcgaaataaaaacaactcaggaatgcgatgtgggggatgaagctgtcatgaataatactgcaaataatgccaccctggagttccatgttgacctcgcactggagatcagagctttcagagaagagttaggatctctcaagactcattgcagcaaagagataaagggagtgtgcggcgagtttaaggaactgagggaggaaatttccagtttcaaggctgcgatctttgcatgcaacagcaggcttgaagatatggagaagcgagtggaggccatggagacgaactacgcaagcagtaaatctcctgctatagaaagcctcgagcaagcgattgaggatttaaaaatggaactacaggatcgtgatcaggatttgttggcaaatgatatacagataacacatataccggagaccaaggcagaaaaccccttacatctagtgaaggtcatagcggtgaagctgggcatgaccctcgacgagcgcgacatcgtgagcgccgtgcgggtgggcgcgctgcggcctgcagcgggtgcggcggagggcgcg

SEQ ID NO: 333 - DNA, 621 bp, Plutella xylostella
  misc_feature (1)..(621): Gene targeted: Vps28; Universal ID: GS939
cgattctgccttttccggctcttgtgtcaaagaaagcttgaccatgaagcaaatagttgcgaatcagaaagtgaagatccccgaggggctcactgtacacgttaaatcgcggttggtgacagtgaaaggaccgcgcggagttttgaaaaggaacttcaagcacttggctgttgacattcgcatggtgaacccgcgagtcctgaaggtagaaaaatggtttggctccaagaaggaactcgctgccgtgaggactgtctgctcacacgttgagaacatgatcaaaggtgtaaccaagggattccagtacaaaatgcgttccgtatacgcccatttccccatcaactgtgtcacaactgagggcaactcagtcattgagatccgtaacttccttggtgaaaaatacatcaggagggtaaagatggcacctggtgtgaccgttgtcaactcacccaaacagaaggatgagctgatcattgaaggcaactccctggaggatgtgtcgagctctgcggctcttatccaacaatcaaccacagtgaaaaacaaggacatcagaaagttcttagacggtctttatgtgtctgagaaaacaactgttgaagtggatgagatttaaggaca

SEQ ID NO: 334 - DNA, 6227 bp, Plutella xylostella
  misc_feature (1)..(6227): Gene targeted: Sec23A; Universal ID: GS928
gctttatgttgctcggccacgtaagtcagggtcgtatttcttgattttatttaaaaatacgacaatttagtgatatttgctatcatgtgaaaatggtttaatacctacaaagtgcacagtgtaattcttagtacttttatttccttttaaacctgattgctgaaacatgtcgaatctaccaccaaatccatataacagcattcctggaccacctcaaatgaatgcttatggaggaccgcaaatgaatcataatcagccaccattggggcagcctaattatagtggattgaaggctgatgctaactctaacagcccagttcacgccccggtctccctgcgccaggataacgctcaatatggacagcatcagagtgtcaacaactataatcagagttctaatagttcacctgccttcaatagaccaggcactgtgccgatttcttctgcccttcctccatctatgctcccacctgtgaaaaacaaccctatgcccagtagtgccagtcatttccccaactcaatcattccacctaatgttccactctctacttccagtcctaaaccagtctccaatgttaacacctcatctccgtacccacccagcttcattcctccaggtagacaaattaatgacaatgcaccaccactcataccttctagtcagtctttccatcagcctgttatgaatgggccctctggtcctcctgctatgccaggccctcccagttcaatgccatctcagtatcctccttcatccagagcattcagtcccccgggagtgatacctccaacatcagctatctttgggccccctggccaggtgaactcaatgtatggtccacctcaacctggaatgaagcaaccaaatgccccattaactggaccgccgacaccagttcaaagatgtagcccagttgtaactggtcctccaccaaatgtgcaaaggccagtgggggtggcgcctccagttacaagtgctgcaagaccaataggagtaaatggaggatcatcctttgccagcattccacaagtaccacaaccaaatttgggactcatgggaccgaaaacaagtattccccaagttgggccaagtcctagtttgggtcctccattgaatgggcctccaggaccaacaatgcagccaggagcttcgccatcgagacctttagttcaaccatctaatccacaactaagtggtccaccaactggaccacaaagtttaccacccatgggaccacctccaggaatatcaagaggacctgtacaaagtaatcagactggactaccaagtggcccatccatgggtccccctagttatgcaagtatgggtcccagtgtcccaccaataggacatccacccatgaatccagctatgccacctggccctcagggtttacagggccctcctggtctccagagtccagttggtctacaaagtggtcccactggtctacaaagtggtccaacaatgggacctcagagcttacccccaatgggaaatcaaatgccagcaccaggagcgccaatgactaatcaacctatgagcaacatgcagccgcggtatcccccaatgccacagagtaactacaaccaaggccaggtccagccgcccaggccatacccacagcagtacaatgcccatggagtcacacagcagatgggcaacctcagtgtgaccaaacaaggatttgaccagctttgggggcatcagaatgttgacctactgcagacaaggcatatactgccagagtatccagaagacctccctgagataagacttggacaacagtttgccgacgccccaaattgcagccctgatgtgttccggtgtacggtgaaccgcataccagaaacaaacaatctcctgcaaaagtctagattgcccctaggaattctcatccaccccttcaaggatttaaatcacctgccagtgatccagtgcgcatccatagtgcggtgccgcgcgtgccgcacgtacatcaaccccttcgtctacttcctcgactcgaagcgctggaagtgcaacctctgcttccgcgtcaacgacctacccgaagagttccaatacgacccggtgaccaagtcctacggcgacccgtcgcgccggccggagatcaagtcggccaccatcgagttcatcgcgccggccgagtacatgctgcggccgccgcagcccgccgtctacctgttcctcatggacgtcagccagctggcgcgcgagtcggggtatctggaggtattctgcaaaacgctcaagagctgcctggaccagttgccgggcgacgcgcgcacgcaggtcggcttcatctgcttcgacgcgcacgtgcactactacctcatgagcgacgacgccacgcggcccaaggagatgaccgtgctggatattgatgacgtattcctcccgtcgcccgagtcactactagtaaacctgcaagagcgtcgcgagctcattaacgagttgttaaatgttctgccgcgccgccacgccgcgcccgccgcgcccgcctccgcgctcggcgccgcgcttcaagccgcttataaactcatggcaccgactggagggcgcatcacagttttccagacatgtcttccaaatgtaggacccggagcgctacaaccaagagaggacccgaacgcgcgctcgtctaaagaagtggctcacctgaacccggccacggacttctacaagcggctggcgctggactgcagcggcgcgcaggtcgccgtggacctgttcctgctcaactcgcagtacgcagacctggccacgctcagcggcatgagcaagttcagcgcgggcaccgtgtaccacatcccgctgttcaacgcggcgcgtgcgtggcaggccgaccagctcaagaggatgctgaatagatacctgacgaggaagatcggctttgaggccgtcatgagggtgcggtgtactaggggcataacaatccacacgttccacggcaacttcttcgtgcgctccacggacctgctctctctgcccaacgtgagtccggacgcgggcttcggcatgcagctcgccatagaagagtcccttaccgacttacagcaagtgtgcttccaggccgcgttgctgtatactagcagtaaaggtgaaaggaggatacgagttcacacgctagcgttgccgatagcgtccaccctgcctgatgtactgcactcggccgaccaacagtgtatcataggactacttagtaaaatggcggtggaccgttgcgcgtcagcctccatgtcggaagccaaggaggctatcatgaacgtggccatagacgttctctcggcgcatcgactcgcgcagaacctgccggccggcgccgcgggctcggctcttcacgcgccagcctcgctgcgcctcctgcccttgtatcttctggcgctactcaagcgggtggcgttccgcactggcacttcgacccgcctcgacgaccgtgtggcggacatgtgcggcatgaagacgtccccgctgagccagctgctgcgccgcgtgtaccccgacctgtaccccgtgctcgagctgactgaggaggacgagccgccgcgcctgcagctcactgccgagagaataaactcaacgggcgcctacctcctagacgacggcgacacgctaatactctacatctgccacggagccagccccgcctacctgtctgacaccttcggagtgacgtcattcaaccagctgccggatgagtctagaacactaccggtcctagactcgcccgggaaccaggtgttgcacgcgtttatagagaggctaaatgatgaccggccgtacccggcgaatatgttggttttgagggacaactcaccatcccggatgctgttcaccgagcgactagtggacgacagagtagaatcggcgttctcatactacgagttcttgcaacacatcaagagccaagtgaagtgaggcgcgggcgccgcagcgagcggtcgcgacccgcgcgcacttcacacccgttcgcgcggcgttcgggaatgttcgtgcgccactcgggactactcggccgagctcgctccagtcaagtgctgagtgaacggcgcgtcaatcgcaacggtccgaagtcgggtacgatcgacatcacacgtttattacaatttgtttcgtagtctatagtgcaatgtaaataaacaatacggtttcagattttaacggaggttttttttcggttcgcggatcgttgttaattaaaaaagtatttaaatcgttaagtaccttgtagttgtaatagagtctgtaatgatagcatagtgagtattctatggatggttgtgattgacgcgccgatagagtgagtggagattgccaaaggaccgatccaacgctactacactgcccctatcctttgatgactaaaatatagttaactatagttacgtaaactgatcatcagatatactaacgttgcactttcctagctttgcgtacaagttttatttgtttagagaatcgagacgtttttttttaataattcgatgggacacattttaacaattttagtgctgaaagcgttagtaaatttcttgattgtgcaagcagcgatgttttaaagtttttcaactaattcgaaccgacgaaatatctaggtagtatccctatttataagtattctacaaagctcttaaaacatcgccaaaatgttgttggtgttgtgaaataggtcttagtgatatacagcatagatatgaaatgtgattcgattggttgccggatgtgagacatcgtgtgtttcacgaaaaaattaaataagtaataatggaatgttatcggtttaatttgtattagaaatttgtatttatgttgttgggcgatgaatgtataaatgggcacattattgccgatataagcagacaagcatgagatttggtatttacagaagggaaagaacaaaccagatagcggtgatcaaatttccaaatacgtttttcttcacaagggtagaaattgtttatcaaatctcgtgtatatggtatagtactaagagtgcacaatcggctgcaagcgaatagtatcgggactgtccctagtgtttggtagatatttattcattgaatgtaagcgtgtaagcaataaggttaattttgtatcgtcacacagtcacattatacacgggaataggttaaatctagatatttaatgccagtggctgtgtactgcggtttaacgaaaatatttcattaaatattttttgttgattttttgtcgttattttgtcaaaggctagggctagtacttgtagccacatgacggaaacgcagtttctgtttattcctgctttgtaattgtaacctgagtgcagacggggtgtgatgtttaaacagggctctgtttgattcaatggccatttatgtatgaaaagctattaccatatacttaaaagtatagatggtccaagttattacgtatgtatgtacctacaccactgttaatgaagtatatgtatagcataagaaccttaatatctcggtcgcaccccgactgaacccaggagattatctgtaataaattagttttaattcatgtatttacttgatattatcacttcaatttgtataaattaaaatatttatttatgaaattattgttagtcggtttcgtctatccccgttgccaagatctaccgtgtgtccaccgatagatactgatgacactgttccctttagtggaccgcccttgacaacgggagtagagggggttttatacaaattatgctcggttcagatgtaaaatagaactatgtaaaataaaattatctaattttaaagttacatggactacggcacgaaatttacaacataataattattaaattagaagaaggtactagagccgctcacaatttgcctattcaatacaatttacaaattttagaacggctacatagtttcgaacattggcctgattctgcaaaaaaaaatatattaattttattgtagaatcaggagattgttattcataaatagagaaacgaaaattgtattctgttaaacagctttagatttggtgaggaataacaggagaactaaggctgtaccttcgtttagcaccatgtttagttgttacccaactgcccgtaaggagggttattatattacgacaatgccttaaaatagtaacaatacagcgagtccacagcaaacaaacttattattatattgcgactgaaacaagacaagtaaataattataattagtctccggactgaactcttgag

SEQ ID NO: 335 - DNA, 2618 bp, Plutella xylostella
  misc_feature (1)..(2618): Gene targeted: Sec6; Universal ID: GS929
ttttttttttgttttagctaatgttttgatgtgtattattttacgaaattttgtaaatttggttgtttattaacttgaatctaagtttgttcaacgcctagtagaggtgaaggtttaataaatgtgtactttgttcttaatcaaataattttcataaggtaaataaataaaataatgagctccatggaggaaattgaagaagaagcgaaggcgatggcagaaaagatggtcatgaatatgatgcagcgccccggccaacttgaaaaggtggaacaatacaaaaggagaataactcataagaaagcatctattgaggcgcaactgaagtcggcggtgcagggcaagctggacggggtcagcgtggggctgaagcagctgcaggagtgccttgatgatgtcaaggaaatcagtgacaagatggatgagctgaaagagtgtctgcgtggagtgcccccgctagtggcgtccctgcaggcggtgcgggaggaggactcgcggcactcgcagtacgtgaccgccatggacagcctcaagcacatcttcactgtgccggagagcgtggccaaagccaagcagtggatctgcgaggggaagctgctgcatgctcatcagtgcctctctgatttggagaattctcgtgatgacttgctgtacgagctgcaccgtctacccaaccagtcctctcatgacaagatcatgctgaaggcatacttcgaggatgtggagatggtctccaacttgctggagaagcagatcaagctgatcctcatgaggaccttgaacacagttcgtaaggagcccacagtgatagtcacagccttaaggatcattgagagagaagaaaagagagaccaaatggcattacagcaacagaaccagtcgggcttcctgcccccggggcggccgaagggctggcgcgcgaaggcgttcgacacgctggtgtgcgccgtggcgcagcgcatcgagggcacccgcgtggatgagagagaggataataagctgtggcttgtcagatacctggagctgacccgtcagctgatcgtggaggacctgcgcgtggtgaagacgctgtgcgcgccgtgcttcccgccgcactaccacatcgtggacaagtacgtcgacatgtaccacacctcgctgtccgccagtctacaagacgtggtgctaagcgggctagaaggcaacgagtatgtgaccctgctctcctgggtactcaacacatacccggggcccgagctgatgcgctcgcccgagctcaacatcgacgtggcgactctgccgccgctgctgtccgaggaggtcatgaacaagattgaggaggagtatttgcagaaaatggcttccaactacgtgtcctggatggacaagaccctggagtcggagcgcgcggagtggggctcggaccgcgcgcccgagcgagagccgcacactggagccttccacacgcacgcgccgctcatcatcttccagatgatcgaccagaacctgcaggtgacagaaacgataagcaaagaaataacattcaaagcgcttatactgagcatcgagcaagtgacgcgctacggcaagatgtatcgacagggcgtcatacagttcaagaactcgcacttcgcggaccgctcccgcgtggcgtacttcactcaccacatgatcacgatcgtgaacaacagctcgctgatggtgcggctcgcgcagcagacgcaggcgcgccgatggcctccgggcacgcaggacaaacaggccgaggacaagttcatacagatgattaatacttaccaggacctccgagacgaagcagcgaggtttctgcttgaggaagcgttcctggatctagaggtccacttcgacgacctgttctcgtccaaatggctggcctccaccatccccatagacaccatctgtgtcacacttgaagactacttccaagattacaaccatttgcgggataaaaacttcgaatacgtgataaacgaagcccagaatttggtttacaagaagtatgtgactgcgatgttgtccaagaagtatacgtttaagacggtggaggaagcgactcaagcggctaataagatagtgaaggaaggcaatcagattaagtcattcttcaaaaggattgcgcctgaagctgtggatactgatcgcccgtttgagattcttagcattttggctgaggtgctccgctgcaccgacacagaaatgctctcactggacctgcacggcatcgtggacaagtgccccgacatcacggaggaacatctcgtccgcctcgtgtggctgcgaggagacgtgcctcgagcccagctgaaggagaccgtgtcccatgtgatgaccactagaagagcgcctaagacgctgcatagcgacttctttaagagtatagtgtttgcggattcgatcacggctaagttgactaattttgcactttaggcgagagtagtaataggtacagctcaaggataccgtgtctcttgtgatgaccactagaagagcgcctaagacgctgcatagcgacttctttaagagtatcgtgtttgccgattcgatcacggctaagttaactaattttgcactttaggcgagtataattggtatagggagtagtaataggtacagctcaa

SEQ ID NO: 336 - DNA, 1927 bp, Plutella xylostella
  misc_feature (1)..(1927): Gene targeted: vATPase-Vha26; Universal ID: GS940
cttgctagctctagtttcggggttgtattcttacagtaaataatagcctcgcgcttttgcataaacgtcgtcgatcgatggtatcggcattgtgctcgtctacactctcagcctcacgagcatgtgaaaccaaagttttgtttatttaatatggcaacaccaaaaatcatatgatcgttcaatgaagaagtgcgactgataggcgtcgacttctttttctgagccagttcttcattttctggctcaatatcggtagtttacgtgttagtagtgtttaatatcaagcagcaatcatggcgctcagcgatgcagatgtccaaaaacagatcaagcatatgatggccttcatcgagcaagaggcaaatgaaaaggccgaagaaatcgatgctaaggctgaggaggagttcaacatcgagaaggggcgtctggtgcagcagcagcgcctcaagatcatggagtactacgagaagaaggagaagcaggtggaactccagaagaagatccaatcctccaacatgctgaaccaggcccgtctgaaggtgctgaaggtgcgcgaggaccacgtgggccacgtgttggacgagacgcgccgccgcctcgccgaggtgcccaacgaccaggggctctactccgacctgctggtcaagctcatcgtgcaggcgctgttccagctggttgagccaaccgtaaccctccgcgtgcgcgaggccgacaagccgctcatcgacagcctgctcgagcgcgcgcaggcgcagtacaaggagaagatcaagaaggatgtgaccttgaaggtggacacggagcactacctgccggtcggcacctgtggtggcattgagctggtcgccgctaggggccgcatcaagatcatcaacaccctggagtcgcgcatggagctgatcgcgcagcagctgctgcccgagatccgcacggcgctgttcggacggaaccccaaccgcaagttcaccgactaaacacaaccctcaaccaacgcgcccccggcgcacatattcaactttcttattactattatgtagaactaaaatgttatttataagtgttttactttttgcctaattaattacttacttacttatatgtataatattaaatgcgtacaacattattaacatgtatgaaagaatccgtattaagtcagaaaatgtattacaatagtaagtgcgatcatgtggatttctgatttcgtggtaggtttaacgttcactcttaatgtacattagttaccgccttaacgtaatgttcgaacagtgtctaagtattatattactacaattcattcgtgtaacactagttatatattagcttagctgtagcttttaggagacacagttaaattgaaatgttataccgatgcttgatggtaggacaaacttattggtgtgtaagcgtaagcattttattgatataattctggattgttgccataacaattattacacaaatagatgttatcgatagtcgatgtaatggagtaagtgacagcgcactttcgatggaaaaagcacaagttacaaacttcacgacagggcgacgtcaatacttagatatataaatgtggtaaagttcaatgtattttcatataatcttccttgtattttggactcgtctatatatactgtttactatcgtggacttcctgggaattatttgatgctgtaaggtttatgggtgacggcagcatcccgccttattcccactgaaatcgaagtgaaagatttgactgggcgcagggcggtgtcacccgtacatctttcagctgaaaaagacattcctctttcatgtttcctgtcctggcaatcaaatgtttcggcttgcttttaacagttctatcgaagagcaccgtagctctataaattacataacgaatataatgtttaatccccattatggcactgttaaaattctt

SEQ ID NO: 337 - DNA, 2884 bp, Plutella xylostella
  misc_feature (1)..(2884): Gene targeted: Vps16A; Universal ID: GS941
aagcaaaacaaaggcagattcttgtgatgaatttgtttgatttgatgatattttttctaaaagcgatggaataaccaacctaactaatttctaatgtgtactgtaaagtaatgtaaacacaattagcgaaaaatagtgctctctttatacaatataaatctaacaaaattgattacggccacgtaaagtaaattgtgcaaaccaataacagttaaaaagtgatttgttcctaaatttgcaaacatgtcggctcttcttaccgctgattggttccaactagattcctattataggaaatttgaccagtacacaatgaactgggctatggatgaggggttggacaatatgatagttaccggagccccatatggaggccctattgctgtgatacgggacaggaagcagtttgtgcgagtcgtcactcagtccaaaccagttataaccatctataactgtgttggaaacattatatcaaaaattctgtggaacagcggtgtgctggtgcagctgggctggtcggacagcgagcagctgctgtgcgtgcaggagagcggggacgtgctcatctatgacatgttcggagcctaccagaagacattcagccttgggcaggaagtgcgggatactaaggtttgcaaagcgcagttcttccccaatcccaatggcattggtctaggagtgatcacaacaaccaatagaatgttcctggtcaacaatgtttccgaacctaagataaggaatgtgccagatctgccaagggccaacgagctgatcacgtcgtggtccgtgctgtgcagcggctcccgcgccgcggctaatattggtttccttgtgtcgagagataaggagctctacaagtgtcagctgggcgagtcgagggctgtgttgatgcgacccgaaatccgcaatccatacacgcaaatcctttcaatagtgccgtcacaaaatggacgccatgttgctctattcaccgactccggattcctttggatcggctcgtccgacttcagaagcaaatactgcgaaatcgatacaggatacgttaaacaacccaaagaattagtttggtgcggctcccaagctataatagctcattgggaagacgtgatgtgcatatacggtttcaacggcaacacatcaaacttccaatacgacgggccattccacatcataccagagatggactgtgtccgggtggtctctgagatgacccatgagattatccagaaagttccagtggtgatggagaagatatttagaattaacagcacggcccccggagcgtatttggttgaagcctcaaagcagtttcagaaacgaagtcaccaagccgacgagtacattcgcctagtcaagccggacctgacatcagcagtccaagactgcatcgatgcagcctcctacgaattcgacccggaagtccagaagatgctcatcagagccgctcaattcggcaaggggttcatcatggatgccaacatcacggatacctatgtgaagacgtgccggtggctgagggtcttgaacagtgttcgggacccgaaagtcgccattcctttgacgtttttgcaggtccagaacctgggcgagcgcgtgctgatagaccggctgatctggcggcgcctgcactgcctggcgaagcacgtagcagcatatctgcagatgaaggatggacctacacgcgtgctgtcacactgggcttgctataaggtaacccaaccgcacctggacaacgagagcgcggcgcgggagatcggggagaagctgcggggcgtggccggcgtgtcgtacgccaccatcgccatgaaggccgccgataagggacggaaggcgctcgctatcaagatcctagagtacgagactcgcagcaagctccaagttcctctactgctggctctgggcgagggcggcaccgcgctgctgaaggccacggctagcggggacacggacctggtgtatgtcgtgctactgcacttgaaggagaacatggggaaacatgagtttgagttgacaatccgcagtttcccgctggcgcatgcgctgtacatcaagtactgcggacaacacaaccgagaggcgttgcgggctatatacgtacaagaagacgacttcccgggccaagccgccacgcacatccacgacgccatagagtcctccaatcccggcagtgtcgaggccagcctcatatctgccagagagtgctataagaagggaaagaatgatttaggtgtgtccatatgcgaagactctcgcaagctgtgcaagcagcagtcgagcctgcaagagacgtacggcgcgagcttcgtcggcctctcgctacacgacactgtgaagaaacttctggaacagggcgaggtcaaactggctgataaactacgatcggagtataaaatgcctgataggagatactggtggatccgcatcctctctctagccgagcgcggcgagtgggcggaactcgaccggttctccaagtcgaagaagtctccagtcggctacgagcccttcgtggacgcgtgtctgaagcacgacaagaccgacgaggccctgaagtacctgccgcgctgccgggacgagatcaaagtcaagtattacgttaaggctggattttatgaagaggcggctcaggtggccttcgaacagaaagacgagagtgctctattcttcgtgcaaagcaaatgtcccctcagagattccatcaaacatgagcgaatatctgcactgctagaacaactcacgtctaggaagtaagccgtcattcattcattcccacaccatgaaagtactatattatttaagtgaacgctgtatataattgtaaccaaatattatatgactgtatttaatatgtatttactagtaagaaataaaatgtatcaagtgg

SEQ ID NO: 338 - DNA, 996 bp, Plutella xylostella
  misc_feature (1)..(996): Gene targeted: UEV1a; Universal ID: GS930
cgacgccattatactatctgtcaaatatttcaaattgaagaagtcgctcgattgttcaacagaaaattggaggcaatctattgtaactgctttaattttatcgaccttagtatggctcaaaacatcaatcctcattattcttcgtcctctaatcccgagaaacagaacgagggcacgattaaactgaaagacaatcacgctgtaagcaaaagactgcagaaagagttgatggagctgatgcgatgcgctgacaagggcatttcggcatttccagagagtgaaaacctatttaagtggataggcaccattaacggcccgctggagacagtttacgcgggacacaagtacaaactgtccctggagttccccaactcgtatccctacgctcctcccgttgtgaagtttgtgactccgtgctttcaccccaatgtggacacctgtggtttgatttgtttggacattttaaaagacaagtggacagctttgtatgatgtccgcacagtcctactctccatccagagcttgctagccgagcccaacacgcagagtccgctgaaccagcaggcgtcgtacctgtggcccaaccagcccgcctacaagaagtacctagatgaattttacaataaacacaaagactcatagtcgggtcggtagtaatgtttggttgtttgtgtcaatatgattctctgattgtgttgtattttgtgtttgtgtcgagtttgtgctgatattttgtgtctgcgctgtgaagttgggatgttggcaagctaatctttcactctggttataggatatttgttttcattattctttgtctttaatttataatttttcaattaagataatgattgtattgtaataaataactattccgcctgaattatgttttctgtttctataaattattttttaggttttttggcttgtcaatcttcacttcattggtttgtgaaattggtatgaaagattatgtataaataaataaaagatcactga

SEQ ID NO: 339 - DNA, 967 bp, Plutella xylostella
  misc_feature (1)..(967): Gene targeted: relish; Universal ID: GS931
ctaaaaagtttttatggtagtggtgaaaacccaattaaaaatgcaaagtgaccaggacacggactcgtcgactgccggtgcttcgccgcgcagcttctacatcgagtcaccgcacagctcgccgggacaacaagtgccttacttaactaattacatgacagtactgtcctgtgcagataataacttaatggatacaggaaataatggcccattcctgagcatcacggagcagccgtgtgaccacttcaggttccgctacaagagcgagatggtcggcactcacggctgcatagttggcaagaccagcgccagcaaccgcaccaagacgtacccttctgttgttctgctcaactacaaggaccgagccaccatcaagtgcagcctggcgcagcacaacaaccgcaagcagcacccgcaccagctggtcgaggatgaccaggaaagggacctgagcgccgaggtgaaccccgagaaggggtatgaagtcggcttccgtggcatgggcataatacatacagcgaagaaagatgttcccgcactcctatacaagaaattgattgagagactgccacatttcaatgcccgtgagctgaaggcccagtgtgagaacgaagctcggagtataaacctcaacatcgtgcgcctcaagttcagtgcgcacaatgtggacacggacgaggagatatgcgcgccggtgttctcggaacctatccacaatatgaaaagcgctgcgacgaacgacctgaagatctgccgcatgagccgcacgtcggggcgcccgcgcggcggcgacgacgtctacctactcaccgagaaagttaacaaaaagaacatcgacattcgcttcgtgcaactggagcgcggcgaggtctgctggaccggcaaggccaggttcctcatgagcgacgtgcaccaccagtacgctattgtgatcagaacaccagcatacaagaaccccgagattacc

SEQ ID NO: 340 - DNA, 6211 bp, Plutella xylostella
  misc_feature (1)..(6211): Gene targeted: diptericin; Universal ID: GS963
gcctccgcccgcctggacgacgcgctgggcgacctacagcggcagcgcgacgacgccgaggcgcagatcaacgaggccttccacgcctacaaggccgccatcgagcgacgccgcgagaaggccctcgaggacctcgagcgcctccacaaagaccgggagctcaaggtgatggacctgttcgaccgcgtcgacaagacggtgcagcgcatcgactgcgcctgcaagttcgcggcgcggctgctgcgccgcggcgacggcaccgagatcgtcatgctgaagaagaccgtcgcgtcgcagttcgcgcgcctgctcgaggggccctccgagttcgacgtcaactactcggtggagttcgtcacgaaggtggacaagttcgacgccatcacagaggagacattcggcagcttccgtactgaggcgacgcgcgcggaggagaagaagcgcgcgagcgagtcgtcggcgattgtgtcgatggcgagcaactcgcactccccggccgtgtctgtatcttcagcaccggtgttcgacgacccgttccctctcggcaacgtgcgccgcgtgacgggcatgggcagcgtggctctatcaggcggcatgggcgccgtgaacagcgtgcccgtgctgccctccatggtggagtacaacctgcagcagctggccagcatcgcggagaaggaggtgcctccgccgccgcacgcgtcgcccgcgccctccttcacccttgccgagctgctggccggggacctcaactcgccgcaagcattcaacaacctgcaagcgcttgccaaattaggattgaacactgaggtgaatgggtatggtggagtgggcggagtaggcgggatgggaggggtgggtccccggggggtgtccccgggcaggcctctgctgactgccgcggaagaagcggccttagtggcgcctcccgtgcccctagtccgcgctacgaaagctacacccatgcacataaggttcaagttcggacaactcggcggcggcaagggccagttcaattccccacacggattctgtctcggcaacgatgaagatatcatagtcgctgataccaacaatcaccgcataacggttttcgacaagtcgggcaaccacaagttcaacttcggcgtggcgggcaaggaggaggggcagctctggtacccgcgcaaggtggccgtggtgcgcgccaccggcaagtttgtcgtgtgcgaccgcggcaacgagcgttcccgcatgcagatatttaccaagaacggacacttcttgaagaaaattgctgtgcgtttcatcgacatcgtggccggcctggccgtgaccgcggaagggctgatcgtggccgtggacagcgtcacgcccaccgtgttcatcctgtccgaggagggcgacctcatgagctggttcgactgcagcgagtgcatgcgcgagccctccgacatcgctattagtggcaaggaattctacgtctgcgacttcaaggggcactgcgtggttgtgttcaacgacgagggccgcttcttgcgccggattggctgcgagaacgtgaccaacttccccaatggcatcgacgtgtcggacgcgggagacgtcctgattggtgactcgcacggcaacaagttccatgtggccgtgttctcacgcgacggcgttctggtcaccgagtttgagtgcccctatgttaaggtatcccgctgctgcggtctgaagataacctcggagggctacatagtcactctggccaagaataaccatcacgtactggtcctcaacaccctttacattgtctgaggagtaacccgatggctgtaagtctgcatactacaagatctcacatttattccctatattttatatttaattgctgttttacaaagcttaacattttttgctaaaccagtatttgactattcgttaatttatgttaaaacttgatgttatgttttagtctgattatgattataaatactacacgctctaacccacatgctgtgaaatgatggctcagatattaacgcttcgtgattactcttatctgaatttcatggcatttcatatttagtgtttcactgcatttgggtagatcttcaagtcattatttccaaagtactgaatacttacgtattttttggtttgtttttcatctctcattttatgtggttgcatttagttatagaaactgaaaatccaaagtttagttatataattgaatatctattattttatgtttgttgtctaaatttaacagctgttatggttcctagttcgagtgaagtaattacatgtcaattaggggactggtatgggtgtcgcctcgtacacttgtgtatttgagcctcatttattagtcgacttaaatttattcacataatatctaaaggcgcatcgtagtcaacacttaaacgcacaattgagtttgaaacgttaaatatgtaaattttgaccaaaggaggcgacactggaataaacgtgccatctagtttaggttaatctcgtatacaatattatatattgtccgttgaaatatatttaccatttacagaattctgtgtctatacaaaatgtttttcatgtactcttgttttgagagcctcttacatattaacgatttttcgttgtgtaggtgattacatttaaatatgccttttggttcaaaaataacatgaataacgaaccaacattaatattcaaatgttaaaatttaaattcgctgtgtaattttaaccttgcaataaattcgtacaattaaacttttggatatagtactacaaaatatattatgtaaatgtaccaatgttaaaaactctttgcacggcaatttcatgtagtttaatcttggagaagtaatgaataagctaacttctacatagtatgcatttgggtagtcatggtaagtgcttgtaaagcaagtagtcacaacagctgtcacaaaattagtgcagatgtcattccaattccagatataactcccagaaactacctatcttgtaataatttgttcctactatagtgtataaaactgttcaaaacatccctatcttattcttacccaaatgtaataaaatatattataattattataatctgaatttgccactgcaaggactttttaatcctatcgttattatattatattcgtatactgtttgtcaaacatatattgatatttttttacattacccacacgaatattcaaaatttgagattttactttttagacgatagatgcaaagggtggtaaattttattgatgtgcatgttatacacctatgcgtacatacatatttatacaaagttaacagattttcacggattcaattagtgtttagctaagcgcgtcacatgttgtagacgtagtgagtgaacgccagggtatgtgtaacgcttgtggggcggctacacgttgtaactagcgagtaatggtcacatacacattgaaacgcatattggctcttgcgaaattggatacaaatatacaacaaatattatgtatttaaaagtcttccaattcttcaaccattaggcttttaggaattaatatctgcgtctctattggtggattaacagtgcaaatataatgttcaaagtattaactttaatttgtgaataattttccaaataatagtgagagttgtagatggccattattttaacgttacaatgtctagggcgagaggtgtgtacttaaaactggaagtagtaaccaatcccaacctgaccatagcgtgtgatattgttaataattatattcatgttgacgtttaattatacagtgctctctattttttgcgagtaaggagaaattgcataaattttgatttgtagttgtaaaacccaagcccatttattctattgtaagtgtataaaatttctgaacttatgggacaatataatattacagtgaaaatctgttaccagtatgtaagtaaggtcattttcttgttgtattgtgatacacgaatccaaaatgaatatttgcccggcactcttatattattataatggagtaaataatatcattaattcccatattgttactgtagctgttcaggagtagaatgtatgagatttatgtacttaattagtaatgtttattttgttattgtattgaagcagtttcccaagtttgaatattttatcaacattagatgtgatagaagcaataatagagacatgtggacgcaacgttgtttaaggcatatagagtcaccggcgcggggcgggtcgtgtcgtacacggcacggcatcgccgctccgacatacactgagtctgaattctctgtcgattagtgagtaacttttgggttttattttttcatattgtttttaagttatttgtttcaggatttttgtcccgatagcattagggaattttattttgtttattttaactaggtttattgatgaatacacgagtctgcatacccctcgcatacgagccggtgtgatttaatactctcattttgtcgttttactgtttttgttttaacgtataatatgttctggcctatattaaaactagtattttggccagtgtttaggcctttagagttacgaatttttactgccaaattattttcttacaatatttgtgcatgcacatagtaattattttattgtatgatatttgtaaagattgattagttactaattgttgccaattttttttgtttattaatattcagggtttaatattaatgttcaattcttaatttgttgtcattgatcaaaattattgtgtgttagtgaagtagcagtaaccgaaatagatgttattaaagccccaaagggagcgtgtaacgctatcaatattgctttagggttgcataaaattattaaaaagtggtgtgataagttttggataattttacaaattatactatttttatgtgtgaattccaatattaataaatttgaagttgaaatatcagcaaatgtataatgtttcatacaatttcaatttaatttgttttatgtttaatgatgaaagtattatttatttgtaataataattgaagcagcaatcttcttgcattaattttggtgatatcttgtcgacagtgtttccttttgttcttgccatatatcttatgtagaatgtcagtgtagatattttttgtagtaattagtatttttcaattcgatatacacgtagtaacagtatcacaagtttgcctatatcgtggtgttgtttagagacgtttattagagggaggggcgtgcgcggggcgcgggcgcgggggttttcgcccgacgtcggctgtatattgctgtagagactaagcactctgtcaagggtaggcgactatggcaggtcaaatggtatcttttgtccattgacgttactcgataataattgtatcattagtacattacagtagcctttctcgggaatcttaaaaagttacctatatatacactttaaaagcaattttttggtaaatatatttctcttgaatctatattcccttatgtatccagcaataaattcatcagtagatgtagggatcactgaacgccgtcggaacgggcccgcgacctcgtccgctgacggtccactatcgccgtgtagcggcatgctacgcgggtgcgtagtggcgcgcgggcgggggcggtgggggcagggagtccggccgggctgcgtcgccacccgcgccggaccggccggcagtcggtagggttcacagcgcacaaagtgagctctacaatgttaccctccctattggaggtgggcgtattgcctaaattgtggcaccaagcacagatcgctaactcgggtgtaggaacgtggcaaattaaagtttaaaattagctgtttaaagttttaaaagacattggtgtcggtcggattagctcgataggcgtttgttcactcgatttatattatagttgagatgttacccaacgtaatttttactcggtcggtgagcttcgacgattcccctcagtattctcactgtcttcacccactgttttgcgatatccaccgatttgaagacagaaataaaaataaggttgtgagctctattcacattgaaattttaagccacatttgtgcttgtgcaataaatatcacagtttggatctaggcttgtaaattaatatagaatatatacattgttgagctgattataaaaatttaatatattattataccttttaatattgttaaagaattctaattgcattccacatcttagagtgaacgaatttgagataa

SEQ ID NO: 341 - DNA, 1234 bp, Plutella xylostella
  misc_feature (1)..(1234): Gene targeted: spirit; Universal ID: GS964
gctctaggggaattccctcacatggtgggcataggcttcgagcgcggcgacggcatagtgttcgactgcgggggctcgctggtggcggcgcgctgggtgctgacggcggcgcactgcgtcgagacacgagacaggatagcgccgaccgtggtccggctgggcgtggtggagatcggcgacaagacgttcacgtccgagacggacgtccggatagcggacatccgcacgcaccccaactacaccgtgcaggagaagtaccacgacctggcgctgctgcaactagagaaagcagtggagacgagcgcgactctgaacccggcctgtttgtacacgcagcccgaggacccctccatagcactcacggtgacgggctgggggcttgtcagcaatatgatggacaaacgcagcgcggttctgctaaaggctaacgtgacgacggtgccgctcgcttcgtgttccgaacactacagcaccccgcagtggaggaagctgccgcgcggcatcgcgcccgagcagctgtgcgccggcgacccggagggcaagcgcgacgcctgccagggtgactctggcgggccgctgcaaggtctgacgtcacgcgacgggcagtaccgtatcgtgggcatcacgtctttcggacgcgggtgcgggtccaaagtgccaggcatctacactcgagtgtacaactacgtggattggatagagagcgtcgtgtggcccaatcagcggtagccaagcaccgtgcggcatgagctcgcccaatcacagccgtgcggcgcgcgctcggccaatcacagccgtgcggcgctcacgttatgataggtggtgctaggttaatgatgcagtaggttattttattagtagggttttttattgttgttgtatggatatctatttatacgattattttaaaacgcagaccaaactacaccggttatagtccagaaaattcatacaatcagtagtctaaatccgggcttaaacctaaactgtgtttagtcttagttttgtaataaggatctaagagttttatatttgtataacatataagcctcgctcatggggtatgtgaaaagttacaatatctcaggggcctatgtgacgaaaaaccaagtttcggagcgctagccacgactctatcccgttgtattaaactaaccgattgcacgctcgttcgttcctttttcgtcagtaaccctccagttactcttctagggcaatctaattccatgacaat

SEQ ID NO: 342 - DNA, 2307 bp, Plutella xylostella
  misc_feature (1)..(2307): Gene targeted: sphynx; Universal ID: GS948
atttttaatactgattgcatttatagataattatgcaacagatattcaaaacaatgtacctcagaataacatttcaaaactggttttagatcaagaaacataagtaagtatactatctaatgagaggctttaggtgctgtaaacagattcaaaatatccacaatggtcactcagacatgctataaccacctataacagcaaactgcctagctcagacattctctcggactcccccattcatgagggtacacccgagtccgcgttgctctatgccccatgtaataaaatggacaaacacaacatctactaatctataaaattctaagatctgaccatgacatacataaggtatgtttacttgaatattaaattattattcgatacataagtaaatacccgtatgcatctttgaagtagattactaaattgatcactagtttttggccgagagcttcactttgccttagctcgggtaattcatggatcagaataagaagcagctcctcttcagcctcacaacacttcatttcattgaaaacaataatttcagatacattaagagaccctcgtgtgggtcgttattgtgatgtggggaaacatgaacagacagactttcgcgttcatttcgcgtattattacagtatggatattgataacgttaacttcactatcactattttcattcaaattaatgttggtagttgcaacatgtaaacatttaaataaaaacgacttttatgaaaaaagtttcatagctctgagtaaataggcacaatgaagagtcttattattgcctcattgttggtaaccgccatttcagctcaagatggaactgatgatttagaacagtatgacatatcttcatttaaatatcacgaaagaattggtatccctgaagctgcgttgattaaaatcgctgaagaagaattcaataagcacccttccaaaatagttggtggaaccctagctaaaactggatcatttccctatcaagctggtttactaataacaacagaagaggataggacatccatgtgcggtgctagtttgttgtctaacacccggctggttacggcagcacactgctggtgggacggagacaggagagccaagaggctcgaagtcatcctcggctccactcaactgttccatggaggcaccagggttgtcaccaagaacgtcaccatgcatcccaaatggaaacccagcagggtacagaatgacgtggccattattgttattccttgggtggattttaatgatcaaataaggagcattgcattaccttttggttttagtcaagactttgccgggtcgaaagccgttgcatcaggatttggagttaggagacggggcgaggaatggacggaagaccagtcggtgaagttcgtatggctgcaggtgatcagcaacaaagtctgcaaggagacttacccgacggtggtgaggtccagcaacatctgcacgagcggcgtggggacggtgggcacgtgtgctggggactccggcggacccctcgcgttggaagctaatggcactaaatacttgattggcatcagctcatttagctctgaccgtggttgccacaagaagcggcctagtgtttacgctcgtgtaactgtctacatgtcgtggatcaaagagcgtctataatgcttcacaccatattccgaatacattagttttgatatcggcgtcgtgtctttcggctcggctcgcgggtgccacacgcggcgaccgagcgggtactctcgcgtcacttactatctaaagtggattaatgcccgcttgtaaacttttcacttatacagggtggaactttaaacgtgaccgacccgaagtcaggctaatgtctacgttgtgtcacggatcagttgtgtctaataaaaaaatctaatgctgtttgtgtaaccatttactatcgctttaaggaacggtcgtttaaattatttcaaatttattattagctagatgatatttgggaaaaatacccattctttggatctatcagtgataaaatttcactctgtaaaacagtataaatgcctgtcgtcgcaagtccacagcctgaataaaacaaaaagcggtttgattctgaattgcaaatgaaaatagcaggcgcttgttaaaatacaacattgcaggaactgacaaaaatatacagagaagtgaagggagtgtacctacctacctacactgtacctacctacactgtacctacccccacttgcgtttgggaacagactacaatgatctacgaaagctagcatctttgaacattaataaatttatttcaatttaatatag

SEQ ID NO: 343 - DNA, 3204 bp, Plutella xylostella
  misc_feature (1)..(3204): Gene targeted: grass; Universal ID: GS957
gacgaagcgagcttttgaacgcacgtcagtttcgaactaagtcgaattcggaacgcggcattccgaatttaaattcgaactttacgagttcggttttcgaaagttttgtgagtgcggtgttcggaacacggtgtaaatgtgatgattcggttggtctgtttgtgtgtgcgtcttttttattgtgtgctgtgacggaaattttattctaatttggagttgttatattttcgaccaacaatttattgttgcttgtaccggatcctgttccaccaatacctaccacattccaagaaaaactaagcaatgacaatacaaaaacattgagtgtaacaaccctacgctgcgatttcatttcgaccaatggcaaggcagcgcatacctcgattccaccaatgagagagctgcgcgggagtatggatggaccatagaatgcgccgagggttggcgcctcttctactgctgttcatcaaatatgttacagccttcatacctggtgctgatggccccgtgtccccggcgcaggggctggagggcggcgccgccacgctggcctgtccctccgcccccgaccagcccgcagacgagatgatgctgctcgtgtggtacaaggacaacgcgcccgtctacagctacgacgcccgcatcggcagctcgtggtccaacgagttcttcaactcttcgggccgcgtctccgtggatctgcaccagcagcccaccaccctcaccgtctccaggctccgggaggatgacgagggcttgtaccactgccgggtggacttcctgatgactccgaccaggaatatcggggttaatttgagcattgttgtggtcccgagctttccattctttctggacgaaatgggcaacaaagtggagagtaaagtgggcccctaccacgagggtgacacgctaatgttgagctgtttagtcattggaggccggccgccgccgcgcatctcctggtactccggaggcgcgctggtggatgcatcagacggcgccagcgaggttcctggagtgaaggagaacgagctatacctgcctctcactcgcgagcactccggcccgctgacttgtcgcgccagtaacacggagctgattgcaccggttgaggcgtccgtcgaaattgaactgtatttgtcccctcagaacgtgtccatccactgggtgtcaggcaccgacagcgaggagacgctgcgcgccggcgagcccgcggtggtggggtgccgggcaggcgggtcgcaccccgcgcccacgctggcctggtggctggatcacaggcacctgacgcagcatagtaatcagacctggctgaacagctcccaaacagcagtctcgtacctgcagctgaccccgtcagtgggggaccacggcgccacgctctcctgcatcgccaccaaccccgccatggagcccgagcgcgcgtcccgagctgacgtgatcacgctgaatgttacttatagtccaatagtagaagtgtctaaggttggcgacgggaagctgaatgaagtggtggaactggacactctgcacctggagtgtgaaattaaggccaacccaccagtcgacaagatcgagtggtacttcaatgacagtaagatccacggcggcgggcgctggggggacaacacgtcagccccctccctgatagtagaagagtctggcagagacctggcggggaggtacgcctgcgccgccgggaacagcgtcggggagacgagggctcatgccgtcactattagagtactttacaaaccagaatgcagtcgcgacggcatcacgctagatcaagaaaccctcacgtgccacatcgactccctcccgcctcctgacgcctacttctggcacatcacccctgtcggtttagaaacccaacaacttaccaccggatccgcccttctgcctctcagccagataatagggccgttgacggaacccctccatgtgatgtgttcggcagagaacgggatagctacacaggaaaaaccgtgtgaaagagtgatcagcttgaagcatttgagaccgccgcagccacagcactgcgatctggcttttgaggatgatgaagtgcagatgcggtgtattccagtggaaaacgcgacgcactacgaagtgtcagtctggcggatgtcttcctccaacacgtccctcatcctggctcaccggggggccatgggctggggctccggcctggccctggcgcgagggccggggccgtggctggtgcgggggtcgctgggccagctgagggcgggtgacgaggctggcgcggccgcgtgcaacgtgtatggatgttccacagccatactgttgaggcccactgatgtgcttctgtatgctgcgtctccgccttggtggcatttcctgctagagcgagacgcattcatcgctgtcggctctgtcctcctgatcgccgtgttcatcctctcgacctacatcgcggtggcgtattcccggcgccgctgcaagcctcgtcctccgatggtgcaagtgcttcagctggatgacgtggcgagggaatacttgcaggcgctcgaagttaagcgtctagcagcgagcagcgtgcggtcgtgcagcagcggctactcgggcggcagcctggagtccgagccgccggccgtggaccgtgtcgccaagccctactactgggaccagccggacgttacgcacacgctgcatcgcgagagcgcggtttgagagaccgggagagcgccgtgtgatagcgaaggctttagagaccttcaaagcgtagatgaagatatcacttgattcatgcaacaaaatagcgagactttcatgccttcgtttacacgtaaaacaagtacgtagggctctatgaactatctcaatattataatgtctcatttggtttcactgatcaactcatcattcttaactaagagccaaaagttttaaatatttgtgaagtcatgaagaaaattttgttttaaacaaagacatattgatggtgatgtgaattataaacaatggagtggaaaccactagcaggcacaggattatagcgtggtacctcccggtagtcactagcccggtagtggttgcatgtgctaggcggagtagacaacaatctcaaacctccagcagtagacaatttttgactaattgactaaatacaatgaagttgaagaaaatactgcataaaattgtctactgtacacacggcaacgttaaatggttggcggg

SEQ ID NO: 344 - DNA, 2073 bp, Plutella xylostella
  misc_feature (1)..(2073): Gene targeted: pelle; Universal ID: GS953
ggtgggatgttgacgttgtttttgttaaaattctgtgttatttcaaaatgaaaatatacgaattaccgtacgatattaacaaggaattgtgtaggttattggacatcgacgatgattggaagaagttggccggggactacatgcagtactatccattcgacataatcgacatagaacaggaagctcgtcggcaagtcacatccccaacaaaccagctattcattcgctggggccagctcaaccacagtgtagaggagctctttgtgctgcttcaccgcatgaagtatgtcacggcgatgaagctcctcctgccggttgtggacgctcgcttccacaagctgctgaggaagcacagctctagcgtgtcacgggagaaggataccgctgctgtggacgaaaatgcgaataaagccaaaatgcagaggcctctgggcagcgaaagctccattcctctgcctgttatgctcattgaaaagggtgaacagatgcctacatctagtagcagagttataaatgcaaatactcgaacggacgattcaagcacagataacacatcatccacggtagatctgaaagccacggcaatgcacgacgagtttatcaaaaacgtttcagcaatccccatgcttagttatgaagacctacaggaagctaccaacaactggagcgaagcgaatctactcggtcgaggcggctttggacaggtctataaaggagaatggaagttattgccgatagcagtgaaacgcttacgggacaacgatggcaagaacagagagttgatcagagagatgtgcctcaaccagtaccgacatgacaatattttgccgctctatggttatagccttggaggtcaagaggcgtgtctagtgtaccagctaatgctgggcgggtccctagagcagaggcttcgacggaagacgcaccacccgccgctgagctggagccagcggtacaatatactgctgggggtggccagaggtctcacatacctccacactatggccggcacacctctaatccacggagatatcaagccggcgaacattctactggaccagtgcactatgcccaagattggagactttggattggccaggaaaggaccttatggggaagagagatcgcatttgaaagtttccagggtccacggcactcgctactacttaccagccgaatacctcaccgcccgctgtctgtccccggcggtagacgcctactcgttcggcgtgctgtcgctggaggcggtgtcggcgcgcggggcctgctcgcgcaccgccagtcccgcgctgctggtggaccaggccagggtcgaaccaccagaaaatctagaagacccgatactgcgggcaaccaacgactcaaacccacagctgtgtgccgcgatggtggctataggcatcgcctgcacagaacctgccagaagacaacggccttccatgctcacagtgtacagacaaatagaggctctacacggcctggttaataataatatggctaatcaagtagcataggtcatagggcctttgaagcaatgatacttagggctaccaaaactcaaatttctgtgaaaacaaatgaggttttacggctgtattttgaagtagatcttcgtcagtacgtctactaacgacgggtttggtagttggtcgaaaactataaaagttttatcgtaaacaaggagagtggaaattattattaaactttgacaaaagaaaaccaaaacttgttactgatatacactgaaatatgcaaaagtattgtggaatgctggacagctagtagatagggctacaacttcggtttgctataatataatgtagaaagtattatgttgagaaaatagtacggatgtctattgtgtatgatgtatatttatatattttattctttatacgtttcaagtcaatactacttatgaatttaacgctgtgttaataatgtcttccattgtagataggtaataaatgttattgttagaatcaaaaggacgaccgaatggcgtagtggttagtgaccctgactactgagccgatggtcccgggttcgattcccggctggggcagatatttg

SEQ ID NO: 345 - DNA, 4462 bp, Plutella xylostella
  misc_feature (1)..(4462): Gene targeted: DIF; Universal ID: GS951
gtgtgacgttcgggtatcacgcacacagatacacattttatttaacatcattttgtttgacgttcactcgaagaaaacttgtggtttctaaaaataatactttttgtggtgccgatattctaataaaattaacaccgttcattgaaatctttgtcgtattattagcaaatttgaatgtaaacagataagtattgctaatcgggtgtcgcgagataacctgtgctacgattcttggaagagtgcgtgcagcgatcgagacgagaccttgataactagttccttggaccagtggagagacagttattataggatcatgtccatcgaggtacgtttttagtttacagcggcattgtggagccgcgtctgtgtctggacggaaacaagttcactgcgtatcggatttagtgcgtcgagaataccaaaccagtgttatgtctaaatgtgcgttctagtactgtcgtgtgcggaaggacggttgtgataaagtgttcgtaacgaggtgcgatggatatcggagagggtgtcccaccagcaacgcaagtagatcaaaatgatgaggaacagcgatcaaatattaatataagtgatgttttggaggcgatcatcatcacggacccaacgttcggtcccggcgtagacgacatgtaccgccccgccgccgccgccgcgccgccgcccgaccgcccctacgtgcgcatactggagcagcccgccagcaaggcgctcaggttccgctacgagtgcgagggtcggtcggcgggctccatcccgggcgccagcagcaccccggagaagaagacgttcccggccatagagatatgcgggcacaagggccgcgccatcgtcgtcgtgtcgtgtgtgaccaaggatgcgccgcacagaccgcaccctcacaacctagtcggccgggaactgtgcaagaagggcgtgtgcacaatgaacgcgcccgccgactccgccgtggtgaccttcaccaacctgggcatccagtgcgtgaagcggagagacatcgaggacgccctcgctgtgagagaggagatgcgagtcgaccccttcaagaccgggttcagccacaagaactcgccacagagcatcgacctgaacgccgtccggctctgcttccaagtgttcctgcccgacgagcgatccggcaagatccgccacgcgctgccgcccgtcgtgtccgatgtgatatatgataagaaggccatgagtgacctggtcattacgaggctgagtcactgttctgcgcccgcgcagggcggcaagcaagttatactgctgtgtgagaaggtggcccgtgaagacataaccgtgacgttcttcgagaagtcgggcgagcgcgtgacgtggcaggcggacgcggcggacgtgttcgtgcacaagcaggtcgccatctgcttcaccacgccgccctaccgcgacccgcatgtgcaggaccatgtgcaggcgtacatccagctgcgtcgtccgacggacaacgcgacgagcgagccgctccccttcgagctgctcccgtccagcgcaggtacagtccgccgcaagccgccgccggacctgtcgctgctgacgctactgctgcaggaccccaagcgggaccccaacaacaaccagcacaccgactccgtcgtcagctccacgagtgacaccacggaggagctggccaacggcatggacgtcacagagacgatagtcgttgaggataacaacgctaagagtctgaacgagttgctagatcaggtcgcggagctagatgagatttattcggagaataggacgcggttagagacggtgtcgcagctacagcatagtaccgacacggagatggaggactttaacgatgcgggcacgtatagtagtctacaactcgcgtttaagaacccggtggagatagcggagccggaaccgatggcgtatgagcccgtacacacgttccgctcgccggttatcgagttctctccactaaagcgagatgatgacgacgacgagcccgcgccgccgctgccgcccaaacgacgcaagactccctccgtcgacgggttcaaaaccagtcagacgtcagtcgacagcatcctcaagccgggtcgctccatccccatcactcggcaggtggaccgctcggagctgtcagtagcccgcagcgagcccgcgctgccggcgttgcctaagaaacggtccttcctctcccgcctgttccgtcgtaaagacaagtccccggcgcccagcgtcaagtctgagggcaagcgggagaagaagagcaagtctgtcggtcgctctgtaagcagtgtttctggcatccgcccctccaagctaaagacctctgtgtctcacgcgtctttaaaggacgggacggcttcggccgccaaccttagctatgccgactctattactcatatttccctccacggggatgataatgagaagtcccctgttctatcatctaatgcgaatctccccggcatgcctccgacagatggcgccactatattagtagctgaaagcgtgttggctctcgacgctacggctttcaagaagctacaggatgatctagatctgacggacgcagagcactatgccctgtatatggccgtggccccgcacgccactgcctccgagtttgacgagacgagttgctactactcgccggtagatggcagcaagtttcacaactaaactgttggctcccaagtttgatatcaaattgatttgagaaggagttatgatcggttgattaaatggtgtcctaacgcctgttttacgaaattgcttgcgaaatgagttagatatttccaaagtgtggaaactcagaaagcatcgcgatgcagctccgcccttgtctgccaaattttgcgacttttatatttcgttttagatttaagatgcatgttgatgtgcgaaattcagctaccgagattcttgcctctgtaacaaaactagtctaatttattctagtcctagatgatgggaatgtaatttttgtgtgacgttatgtttaatgtttatttcgtatgttttagatccgaattatctgaagcgaaagcgacagaaaccgatacagaacttcagtcggtacttacagccgatcgatagcgagatgaagcagcagctgccggactacttccaggacaacatggcgctgtccaacatcccctccgtgaagctggagccacgagataagactccgcctcacaacatgagcagcccgccgctgctgttcccccccgcgcacgccgcgcccgcgcaccacgacccctacgcgtggaacatgcaactagacaacatgcagtcgggtctgacggcgcccgggccgagccgcctgccgcagtacaaccaggacatggcctggaccaaccagatgggccacgtctcccctatgcaccaggccatgtcccctaacatgggtcacgtctcccccatgcatcaagcgatgtccccaaatatgggccatgtgtctcccatgcaccaagctatgtctccaaacatggtccagtcacctatgggtcatgtgtctcctaatatgggccacgtgtcacctaatatgggtcatgtgtcccctaatttgggtcatgtgtcacctaacctgtgtcagcaaccgatggctcctatggcgcagcagctgatggacccgtcccccagcgaccccccctccatcacggggctgttgatggaccgcccggaccagccctactccggggagctgtctggactctccgctctgctcgccgaggcagcccccgcagagatgctcagcgatagcctcaacagactgtctacgggggacttgctgagacaagttgatatgtgaatgggtgtagtgctggatatgtgaatatgtgtgtgtaaatgtatagggtgcttgctgcaagtaaggtgcgttcgcagtaggctaactgaattatcggtgtatcggtttagtataccgacattccgagtgtttgcagtttgcttgtcgctcactcacacaatttgcaacgttaagcgcgcctagtaatgagtgatcaattggccgactgggaacgcagccgttattactacagcgcttccaaagcgaaactgaattcgtggacctagaggtcctagagcgttcatctatacctaccgcgattaacgtatgttgcgtagaactctactacgaatttgctttcgctttacaaacgctggaatgagtataggacaccacgtgtggctatcggtgtaacatggatcagtgtatcgttattataattgttagtgaatgtctagtgtctcaaagacaacattactacggttttaagatttgttagtgttttaaaatagtttaattaaaaggtggtgtttaaccaactagaaatatcacaatgttgaaaatgggttccgctcatctggcataatctttattgaccaaaactcatttcgcataactcgtatggtctaaacttttttggccgaaccatcactttgccaagatttatgtggcataagg

SEQ ID NO: 346 - DNA, 1550 bp, Plutella xylostella
  misc_feature (1)..(1550): Gene targeted: Effete; Universal ID: GS958
atcctatggagacttgaaaatgtttcgcaatcaataaatcatctaaacaaaaatatcaaaatcaataagtattctttttctgatttgttttttatttacagttttccactggcaagccacaatcatgggtccagtcgacagtccctatcaaggaggagtgttctttttgaccatacattttcctacagactatccattcaaaccaccaaaagttgcattcacaacacgtatttaccaccccaacataaacagtaatggttccatttgcctcgacattctgcgtgcacagtggtctccagcactcaccatttccaaagtgttgctctcaatttgttctctgctatgtgatccaaacccagatgacccattggtgccagaaattgctaggatctacaaaacggacagagaaaagtacaatgaattagctcgcgagtggacaaggaagtacgccatgtgatgagtctgtggtgactacagctacacatacacacatcgccaccgcccgggctccatccctcccatcccttgttcccaatccttttcaatcattctcaactacccaataattttctggaaaatgtatggtattttacagtcacttgcctgtaacttaatttcagtatgatcaaaaatatggtaattatctctaaataacatgatgatttgtggaaagcttgagtttttgtccaataagtggtaatttatcaactttgtctgatgtgtatttctgtccttagatgtcactttcgtacacttgattagttgaagttaagattagttaattaaattcatttgaaataatgtattcataaacaatttgtactttaactagatctaaaattgcattgtgaaagtttacaatagcctgtgtctaggatctggagcgtgttcattgcttaccacttgtccacttctcatagtaacttgtcaatgaaatgtgagtacctaaactcatgaagtgttatgaacattttgagtaatctactaataataagtggtatccaagcgtgctcgttgacggagtcgaggagcgatatttaattctttttttattagtaaaactgtttttttaagttttagtaaatgtagcgtgctacaatccagactgaacttctataaaaaacaattgaagtaatcagttttctttcatccacaatatcctgattgtaaagaaggaaaacgctccaatagctgcatctttataaattacagtgtatctcataagttacgataatctagtttttttcaatatggcgttctttataattttatctaatatatattgtggttgtaaggatacctgcgttgtgatttccatgaatttatccacttcctaatccactatcctctattgatggcagtcattccgaactcaagacgagactagcaactggtacaatagacggcacgagcggcaaacatggtgtgttctttcagctgcaagatcgaagcttctaatcactttattaacacagggaaaaattgaattcaaggctttcaaattgtactctcaaacttgtatttagcttcactaaattgtaagaaacaag

SEQ ID NO: 347 - DNA, 970 bp, Plutella xylostella
  misc_feature (1)..(970): Gene targeted: spheroide; Universal ID: GS960
ctttgactgaaatgaagctgttggaccaatatctgtgtcagttgttttacaatatcgacaaaatgaagatattatttgcaattttattttttatactgaccaccactgactacaccctagcctcatcttctctcacatcacctcgcataataaacggtgtagacgtggacatcagccgggttccgtaccaggcggccctgaggaggcgggtggcggaggcgtggagccactcgtgtggggccgtggtggtgcactccagggccgtgctgactgccgcgcattgcgtgcttgcatataaacagaatcccgacaacttgcgggtgttggtaggaacgtcctaccgttctacaggaggcagtacatacgctgtgaccaaagtggaagtccataaggattattctagcacatcactgaacaatgacatcgcagtgctacagacgagtttcatagtattcagtgataaagttttgccaatcaaaattataccttacggcgcgttcatacctgatggatctcaagcaatagtttcggggtatggtgtcactgaatccgcaactgcatcaagaacccttcgttctgcgacggtgaacatcgtgcctcaatcggcatgcttacgcgcctacctgtccatagctacggtcacctctgaaatgatatgtgctgttggagccaacccggggaaagacgcatgccaaggtgattctgggggaccgctggcgtacaatggctacctgatcggtctggtctcgtggggggaaggctgtgctgatgtgaggtaccccggtgtgtatacacgagtctcagtgtatactaagtggatacaggaagttttggataaaattgataagaatacggtttgaggaaaatttagaataaaaagtacggtgattttttgaaacagtacctatgtaataataatgtcttggttgtgttatgatattaaatagagattaaggaccctgaaaatgac

SEQ ID NO: 348 - DNA, 4116 bp, Plutella xylostella
  misc_feature (1)..(4116): Gene targeted: Toll; Universal ID: GS952
cgaacggtcgcgccactcgacgctgcgaccccactagcgtatcactacaactacgataaaacaatgtttttataacacgaaattaataacataaactgttactgtagaagaatctagtgtgtaatactcgtcatttgcaagattctgtgcgtgaaacacatgtgaacagttaagttacgtttcgaaagacagtgaaaattaccggacagtgaatttgtgttacgaattataagaaaggatgtgctttaccacgacaaggacaatttgttaaagtgacgccgaattggacctcacaaattgatggattctctacgtccggcaaggggagatagaaaacgaacgccgacggaaaaaacatgacactgagcctaaagtgtcttgttttctttcttccttgatatttgattttccccaaaatggcttgccaacattttacttcaactagacaactttttggacaagtcctcttctgcttcgttatcgggctcaacgtggccgatcaaagctcgctgccattgaaatatgaagctcctgatgactgccagtggtggctacggggcccgaatgactcccacgaagtttcactcacgtgtaaactcaggaccatcaacagtgagtttgacacgacaaacttcagcgtcattccttcggaacatacaacatccttaagaatagaatgcaatgaagaaatgatgtacaagagttcattagatgacagaagtttcgcacacttagtgaaactacgtgaacttgttttggataactgtaaaattggaagatggccaccgggtgtactgtcgggcttgagagacctgagaaacttaacgatccgcactaaaaacacagaatgggccgctatgagcttagagattgcatcagaaagctttacagctgtgcggcagctagaaaagttggatctgagcttcaacaacatctggtcgtttcctgaaaatctattctgtccactaacaaatctagtgtatttgaatgtatcatctaatcgtttacaagatgtaagtgatttaggcttcagagaaaaagccatgcaccaagccctgattagtgaacaggatggtcctagcccatcaatgacatcaattccccgttcatcatgctccttagatattgaagtgttagatgcatctgataaccagtttgtgttaatgcctgaaaacggtttcatggccctacgaagattgaaagaactacacatacatgataacgaaatatcaatggtggccgataaagcgctagccggcttaaaacaattgcaaataattgacctctcaaacaacaaaatcgtcgctcttccacaagatttatttagagattgtagaccagtcataaaggaaatctacttacagaataactcaattagtgtgctttcaccaagcctcttcgctaacttagatcaattgttagcgctggatctatctaacaatcacttgacgagcacgtggattaatgagaatacttttactggtctaataagaatggttttgttgaacttatctaataatagattaacgaaattggaacccaaaatcttcaaggatctctacaccctacaaattttaaatgttcaacataatcagttagaaagcatagccgccgatacctttgcaccaatgaataatctccatacattaatattatcatacaacaaaatttctataatcgatgcctatgctttgaatggattgtacgtgctatcattgttatcaattgacaacaaccatcttgaagaaattcacccagaagcatttagaaatacatcatccctacaagacctaaatctaaacgggaaccgtttgaaaaaagttcccgaagcactcagaaacatgaggctgttgagaactctcgaccttggagaaaatcagataacagctttggatgatcccggtttcgtcggtttgcataatgtttatggcttacgccttattggaaacaaaattgaaaacataagcaaagatgtattttcagacttaccaacactacaaattctgaatttagcacgtaataaattgaggcatattgacatgaaagcattcgaaacgctgacgaatttacaagccattcgactggatgctaaccagctcactgatatccagggactgttcgtaaatatcccgtctctgttgtggttaaacgtgtcagataaccaaatacaatggtttgattacgctgttattcctctgggactgcagtggctggacctacacaataacaacatcaaagagttgggtaacaactaccggttggacaaagagctgcgcctacaaactttggatgcgagctttaacaaaatgacgaaaataaatactttttcgattccgagcagtgtggagttactgttcctgaatgataatcagattacacaagttgaagctcaaacttttgttggaaaaaccaatttaacgagagtcgatttgtatgcaaatcagataactagtatggatctcaatgcgcttcggctaacccccgtggatccgggccggcccctgcccgaattttacatcggcggaaatccgtttcagtgtgactgtactatggagtggttgcaacgtataaacaaactagaccacttgcggcaacaccctcgagtgatggacttagaaagcatctactgtaaattgttgtataatcgtgaaaggacctatattccgcttatcgaagcggaatcatctcagtttctgtgtacatataagactcactgtttcgctttgtgccattgttgtgatttcgacgcgtgtgattgtgaaatgacgtgcccgtcaaactgtacatgttatcatgaccagccgtggtcggctaatatcgtggactgttctgctgctggttatgccgaaatacctagcagtatacctatggacgctactgaactatatttagacggtaataactttggtggactcacgagtcatgcatttatcggacgtaaaaatttaaaaatattgtatgctaataactctaacattgatgctttgtataataatacatttagtggactaaaacgcttaacagtgttgcatttagagaaaaataatattaaagagttgctaggttttgaattgacgcctctggaaagtttacgtgaactacatctacaagacaataaaatacattacatcgataaccgaaccttcatggagttgaggcatttagaggtgctgcgcttggaaggaaataacatttatggctttgctgtgtggcaattcacgatgaatccatatttggtagagataagtctttctaacaatccctggtcgtgcgattgtcagtacatgcacaaattccggagttggtttaaaaacaatctgggaaaagtagaggatgttgacaggataacctgcatatttgataatatcacaaacgcagtgggccctcttatggctgactttaactcaactatttgcacaagtcacgtcgggggagtctcttcaataatagaaaaccaagtaattaatgactatcttccccttctgttaatatcactatgtatattcatatttagctcagcactgctgtgcggagtattttactatagacgagaactccgagtctgggtatactaccactgcggattcagaatgtgttacaaaagcactgcatttgatgaagaagcagataaagatcgcctctttgacgcctacattagctacagtgtgaaagatgaggcatttgtggctcagatgttagcgcccggcctcgagtcaagtgaccctagtttccgtctctgcctacattatcgcgattttaacgcttcggcctacgtggcggacacaattatagaggcggtagagtcatcaaagagaacgataatagtgctatccaaaaacttcataaacaacgagtggtgtcggttcgagttcaaaacagctctgcacgaagtactgaaagagagacgaagaagactgataataatactgctaggcgaactgccgaatagagacattgatccggagttgcgcttgtgtttgaaagcgaacacgtgtatagagtggggcgatagacagttctggcagaagttgcgtttcgcgatgccggacttgaggaagtgtcagtaccaccggtcgacggtgaacatttacgcgtcagtgtcgccggtgggcgggg

SEQ ID NO: 349 - DNA, 2697 bp, Plutella xylostella
  misc_feature (1)..(2697): Gene targeted: Tab2; Universal ID: GS961
agcagggcgcggtgattccgcggcgccgggacgagctcgcgcgaggatgggcggcgatgtctgcccgcgccgacgccgccgccgccgcctgcgcctgcactaacatctcgcttatgcaactgttccacgagctgaagcagaagttcccggccgtgcccgaccatgtggtgtcgagtaccatcgagcagtactgccacgacaagctcgcctgcgaggctcacctgcagcgggagacctcggcgtgcctcgcgctcgcctgccgcgcctcgtccgccgccgcgcgccacctctccgagctgcgcgcgccgagccagtgccccaaccagcccatcgtccgccacgaggtccagcaccctcatgtggtgaatgccgtgacttgccacggaccacaaacagccgttattggctctattgattcaactgaagaagaagaagagacaaaattcaacactgatgccaatcaaaatgttgttgagcacaataagaatttaaaccacaagaataacaatgctacgtcaccagtaactgttataaatattgataactgtatagctaagtacacagcgcaaacaccaagcgagcatgaactaacaaacgaagaggccactccagaaatcactataaatgcagacagtgcaacagagagtaaggaaaaggagttagaacaaccaggaagcggaaactacaggattcataaaagcaataaagtgaaatgcaacctcaatgaaaaactagagaaacataaagaaaagaaatccatcaagaaagaggaacaacctgaacaagaaactgaaaatatcccacaagaaaaaccaaaaaggccaaacaccctagagttcttgaaaccaattccagatattgcatttaaagagccaacaaaggagccacaaccagacacaagcaagttaatatcaccggcagctgctcacaaaccagaatcagtcaaagaaaccactccgggaggatctctgtggtctggtggataccctttgaacttgtctgtcaatgtcaactgtcacatggactatggtcgtccttacgatccttggctagaggactacgacggtcggcaagcaattacttctgtgaacctgacagtgtgcacccctacttcgaacatggccagtccagtgcgtgagtcgcggggcgatgagggaggttttgagggccatgtgacggtgacggtcagccccagtgcctcccgcccgccgcggcgccgcgcccccgcgccaccagtccaccctgccgtggagtctcagagaagcacaagatccactgtggatacatcacaggaccgctctctaatcgagcgtcagcgcgagcgtctcggccggctcaagggggccctactccaggagcgcggccgaatagcccagctcactcgagagatgcgcatcctggcggggccgccgccgccgcccgccgccgcgcgcagtctcagcgactatgtgcacaggttgagggaccagtgtgacacgttggcgaagaggttggagatggctgggactgagcccgaagcggcagacttctacagcaacatctacacggggcagcggccgcccacgcagcgtcccgcccgccccgcgccgcccccgcccgaggatgcgccctggcagtgccacgtgtgcaccttcaacaaccacccgcttctagacaagtgtgaggagtgcgacatgccgcgcatactcgttggtacgtccccctctaggactctggattcggggtttgggtcgttccgagaccggaataggagagtcgagacattcggaggagtggcacggccaagcatgggcgttgcgtatgagttttaagtgttgttgtcgatgtttccgaacagtgatgtgtgtcccctgtgaactttgtgacttttagttgggggctcaagttgcagtgaactttacagcttggattgagtttgttttgaggctatgactgtgaagtgtttggactttacgaagccgatttttattaacagcatgtgatgtggcgtcggcatgtgattttttaacttaatacttaattatagttttaaggttattgttgtttgttgattgtgggcgaagcgcgagttaaatagaaagtacttataataattatcgatcgatatagaaacgaatgccttaaaatatttacacttattttaattttgttataaataatggagattattatattatgatcgtcactaaattttatgattaatatgttttacgatacgcccacagttaacgtagattttgttacatttcacgagtttatatatcaatttttattcaaataactattacatatcaagccaatacctattacaataccgtccatttaagtgttcttaaacctgcatctacttacataagtaattgaatatacccctaccttaacaataaaatacatttaaaacagaggatgggaatacaaaatgtattgtggatatggtacctaacaatcatggtattatttgttaggggtaaatcctttcgactaaataatatgaatatatcgaggcttactgtaggtacttaatgttttgaccaggattccctagaatacctaagttttgtatataaattgaaacgaacgaaacgaactaaatatttaacaaggatacatcatattagttataatattttgacattatacaagttagtttaaaagataaaaaaatgaaattttacgtaaatatcaagtgtgtgtaaa

SEQ ID NO: 350 - DNA, 1164 bp, Plutella xylostella
  misc_feature (1)..(1164): Gene targeted: caudal; Universal ID: GS955
cggcgaccccagccccggcgcctcgccctgcgcgcgccccgcgcagcccccgccgcccccaaggtcgccctacgagtggatgaagaagcccaactaccaaacacaacccaatccaggtaaaacgcggacgaaggacaagtaccgcgtggtgtacagcgaccaccagcggctggagctggagaaggagttccactactcgcgctacatcaccatccgacgcaaggcagagctggctgcgagcctcgggctctcggaacgacaggtaaaaatctggttccaaaaccggcgagccaaagagcggaagcaggtgaagaaacgcgaggaagtagtgatgaaggagaagggcgaccacgcgtcgctccagcacgcccagctccaccacgccaccatgctgcaccaccagcagatgatgagcggcatgatgcaccaccaccactaccaccagggggtgcttcagggcgtgcccgagcccctcgtgcccggcgcgccgcccgtgccgctgctgtgaccgggagacgaatattgtgaaccctacccacagtgaactataaagacttgaatgctttgtgctgcgagcccagtgttgattaaagttttagctaatgaaagactatcggtggtaccgactattattgtaacttcggcatgatctttgtgataaaaatgagtgcaatattcatgcgaggatattctagaccgcttgtgttccattttgccgctatcagaagatctcttgataagtttactattctgtttaataggctgtgttgtttagacaaaggactcgtttaactgacaacaccggtgatacaatcttaaataaatacagtctattgaaatcagaatcacaggtttaacaaattggaaatggaagtggtagcacgctttattatttaatttttactgaacgatgtaaaacaattcgataatttgaatgtcaattttcattgtaaatataaatgcctatatttttatattataattatattgattaaaattattatttgtaaatgaatgcaaatggtatttctcaatgccacaagtgccttatctttaaaattatgtggtcactgaaatagtttggagttgtataaattaaattgttgatatttaatagttatagctttaagcggcaataccagatacatttcattattttatcaa

SEQ ID NO: 351 - DNA, 2201 bp, Plutella xylostella
  misc_feature (1)..(2201): Gene targeted: methonine-rich_storage_protein; Universal ID: GS949
ctgttgtcctggcacaatgcagactgtcctattcgttgcttgtctggtagccgtggctgcggcggggaccatccccaagcccgaattcgaagccaagactgttgacaatgagttcatcgccaagcagaggaaggtgctgtcgctgctgcagcacatcacgcaggtgaacgtggacgccgagtactacaagatcggcaaggaatacgacatcgagcacaacttcgaacactacaccaacaagaaggccgtcgaagagttcctgacctactacaggcatggcatgctcccccatgacgccatcttctccgtctacaacgaggagtgcagggacgaggccatcgccctctaccacctgttctactacgccaaggacttcgagaccttctacaagaccgccgcgtgggcccgcgtctacttgaacgagggactcttcgtctactccttcagcattgccgtccagcaccgtgacgacaccaccggcatcgtcctccccgctccctacgaagtctacccctactacttcgtcaactccgatgtcatcgctaaggtccagggcatcaagatgcagcgtttcttcatccccaagtgggtcgccccttacttcagcattgttgaggagaacaacgttttcaacatcggcgccaactactccggctggttcaacaacgtaaaccaggaacagaagctgtcttacttcaccgaggacatcggccttaacacttactactactacttccacaccagcatgcctttctggatgaacggtgaggaattcggagtcctgaaggaacgcaggggagagatctacttcaacttctaccagcagctgttggcccgttactacttcgagcgtctgaccaacggacttggtgagatccccgagctgtcctggaggtggcccatcaagaccggctacgtgccccacatggtcaaccacaacctgcagccgttcgtgtccaggaacaactactaccagatccagaacgaagacaacatgcgcgacctcgaatacttggaatcctacgagaagcagttcctgcaatacctggaagctggcaaattcaaggcctacaacaaggaagtcgacttcagcgactacaagtccgtcaacttcgtcggaaacttctggcaatccaacgctgacctcaccacccccaggaacttcgagcagtactacgagatcctcgcccaggtccttcttggcgctgcccccaagacctctggcaaatactccaccgcccccatcgtcctgaagcactaccagaccgccctccgcgaccccgtgttcttccagctgtacaagcgcatcctgtactacttcctgcagtacaagcagtacctcgagccctacaccagggagaccctcgaattcaccggcgtcaagatcaacgacgttaaggtcgacgacctcgtcacctacttcgactacttctccttcaacgtctccaacgctgctttctacagcaaggaggagctcaccaacgtgccttactcttacctggtccgccaggcccgcctcaaccacaaggctttcgacgtcaagattgaggtcaagtctgacatcgccgctgacgctatggtcaagatcttcatggctcccaaatacgacagcaacggctaccccatcacccttgaggacaactggatgaacttcttccagctggacttcttcaagaccaagctgaaccagggcaagaacgacatcgtccgcaactctgaggacttcttctacttcaaggaggactccgtctccaccaacgagctgtaccgctacctggacaacggaaaggtccccactgacatgtccgagtactacttcctgctgcccaacaggctgatgctgcccaagggtacccactctggcttccccttccagttcttcgtgatggtctacccctacgtgcctgcccaggacgctggtgactacaagaactacatcctcgacaacaagcccttcggctacccgctggaccgccccgtcgacgagctgtacttctaccagcccaacatgtacttccaggatgtgttcatcaagcacgagggagaggagaacgtgcaccagtacatggtccccaaactcgaccacctcaagaacgttgttgccaagcactaagaggagagagaaagagctatgtgatgccgaaacattcacgtttgtgaatatatagattacctacctatttattatatagtaatgtgtg

SEQ ID NO: 352 - DNA, 3623 bp, Plutella xylostella
  misc_feature (1)..(3623): Gene targeted: Insulin_receptor_1; Universal ID: GS947
cgccggcgctgctgctggcgctgctggccggcctggccgcggcggcgcaggactccaggctcaccggtacctcaggctacaaagtatgcccctccatggacgtgcgcggcgacgtggagtcgctgctgaagctgcgcggctgctccgtgatcgaggggcagctcagcatcgttctgctggagcgcgccaacgagacctccttcgcgaacctgtccttccccgagctccgggaggtcaccggcttcatcaagatctatagactgaaggggctccggtcactgggggatctgtttccgaatctatctgtgattcgaggcatttcgctcttcagggactacgcgctcgtcatctatgacaatgaaaacttgaacgtgctcggcctacactcgctgtcgcgcatagagcgcggctccgtgcgcatagagaggaacgacaagctgtgctacaccaacaccatcgactggtcgcgcatcgtggccaacggcgtcgacaacaacatcatcaggaacaactacgacacccgtctctgcggtctgtgccccgaagccgacggacggacggaggagcggcgcgggccgcgcgcctgccccgccgacgccgccggccgcctgctctgttgggatgacaagcactgccagaagttatgccccggcacgtgcggcgaccgcgcgtgcatgtccaacggctcgtgctgccacgcggcgtgcgtgggcggctgcgacgggccctcgcagcacgagtgccacgtgtgccggcactactcgctcggctacggagggaacaggacgtgtgttgccaagtgtcccgctgggacttatgtgttcctccgtcgctgtatatcagagctggagtgccgcagcctgccgcccgccgcgccgccgcccgacggcaagaagcggccaccccggaactacaagaccttcaacggaacctgcatctatgactgtccaagcgggtacatggaggcgggcgacgctcgcaactcgacctgctcgccgtgcccggcgggcggctgcgtgcgcgagtgcggcggcggcaccatcgactccgtcaacgcggcagaacagttccgcggctgtacgcatgtcaagggcaccctcactatcacactgagggctagtggcggaaacaccatggccgaactggagacatttctgggcgagatccgcgagatcgagggatacctgaaagtaatcagatcacactctctggtatccttgagcttcctcaaaagcctcagacgcattgttggcaaagacactgataacactgggaaaaaccagtcgttctacatattcaacaatcccaacttggagctgctctggaactggacgaagcacggccctatcgagataatgaacggcaacctgttcatacacttcaacccgaagctgtgctataacctgatcgagccgctgatgaccatgactcgtataccgaaagtaaagtttgatgagctggaggtctccgcggagaacaacggagatcaagcttcttgcttccaagacatcctgcacctccaagtgtccctgctccaccggacggcggtcatcctgacgtggaacatgtactgcctcgaggacatccgcaagctgctgggctactccatctactacatcgtggcggagtacaacatcacgcagtacgaacgccgggacgcgtgctacgattcatggaacgtattggacgtcactatcgacgagattcagaacagtacgaatgtgtctaaaacgaagaccagtttgttgagtaacccgtgcagtaacattcagccgttgttccgtccgctgacgcatttgatcccgtttacaagatatgcggcgtatgtgaagacgtacacgacgctgcaagacaagaggggcgcgcagtctccgattatttactttaccactttgcctggaaaacccagcccgccgctcaacgtgctggtagagaacctggacgcgcacacggtatacgtgaagtggtcccctccgtcgatgcccaacggaaccctgcagctgtaccgagtggaggtgcaggccaacgactacaaccagccgcagatcgtgcaactggactactgcaagaaccccagcgccttcgcgaacctaataaccatccgcaaggacgagtcgatggagaagaagaaatatctaccttctaccggagacgttaaggacgagagttgcacgtgccgcggcgagagcaagtcgtcgtccggcacccgcttcaactcgcaggtggaggccgccgccgactccatactgtttgaaaacgcattgcagaatgaggtatacataaagaagtccccgaaccggagcagcaaccgcacgctgacccgcatccggcgcgccatcgacagcagcctcgtcatcctgagcaactacaccaaccccgtgcccgacatgaagtccaacaacgtcactgacgagcgaggtttcgtccgcacggtctacttcgagctgagcggcacttccctctctctcaccatccccaagctgcgtcacttcacgtggtacacggtgtcggtgtgggcgtgccgggagaaggtggacaacgagacgcgcaaggcgtacgacacgctgtggtgctccgagcgcgcgcacgacaccttccgcacttccgatgaagtgaacgcggacgtcgtaaagaacgtgcgagcagaaatcatatcttcaaacaagacgctgccagcggcggaagtcaacgtgacgtgggacccgccagacgaccccaacggcttcgtcgtggcttacgacatgcatcataccagggtggaggctaacagtccgacggcagacgtgggcctgcacagctgcatgagtgcagatgactacgagagcaacggtggcggctaccttctacgcaacctggcccccgggaactatagtgtcaaggtcacgcctgtcactataggcgggcccgggaacgtgtcggcggagatctacgtgtttattcctgagcgcgggctgggctcgggctacgagtgggtgtggggcgtggtgggcggctgcgccatcatgctgctcatactgggcggcggagtgtggtacgctcgccgctcattcttaacccccaacgaagcgaacaagctgttcgcgagcgtgaacccggagtacgtgtccacggtgtacgtgccggacgagtgggaggtgccgcgctccaacatcgagtacgggaaggagctggggcagggctcgttcggcatggtgtatgaaggcgttgcaaagaacattgtcaaaggccaagcggaaactcggtgcgctgtgaaaactgtcaatgaacatgccactgacagggagcgcatcgagttcctcaacgaagcgtcagtaatgaaggccttcgatacgtggcacgtggtgcgtctgctgggcgtggtgtcgcgcgggcagcccacgctggtggtgatggagctgatggagctgggcgacctcaagtcgtacctgcgctcgcaccggcccgacgccgacgccgtgccgcccgacctgcatcagatacagcagatggcgatagagatcgcggacggcatggcgtacctgtccgccaacaagttcgtgcaccgcgacctcgccgccaggaactgcatggtcgccggggacctcaccgttaaggtgggcgacttcggcatgacgcgcgacatc

SEQ ID NO: 353 - DNA, 1711 bp, Plutella xylostella
  misc_feature (1)..(1711): Gene targeted: Sh - Shaker; Universal ID: GS950
gcagagccgaacgccggggccggcaccagggactgagcggggggctccagcaagatgaacctcctaaacatggacgcggaaaaccgcgtcgtgctcaacgtgggcggcatccgacacgagacgtacaaggccacgctgaagaagatcccggcgacgcggctgtcgcggctcacggaggcgctggccaactacgacccggtgctcaacgagtacttcttcgaccggcacccaggcgtgttcgcgcaggttctgaattactacaggacgggcaagctgcactacccgacggacgtgtgcgggccgctgttcgaggaggagctggagttctgggggctggacgccaaccaggtggagccgtgctgctggatgacctatacacagcatcgagacacccaagagaccctggcagtcctggaccggctggacctggacacggaaaagccctcagacgaggaggtggcccgcaagttcggcttcgaggaggactactacaagggcaccgtgtcctggtggcagcacctcaagccgcagatgtggtcgctgttcgacgagccctatagctctaatgctgctaagataatcggggtcatatcagtgtttttcatatgcgtctccatcatatcgttctgtttaaaaacgcatccggacatgagagtgccagtgatacggaactacacagtgacgacggccaaccagacgcagagctgggcgttggacaaagtgcaaacaaacgcccacgtggccttcttttacatagagtgtgtgtgcaacgcgtggttcacactcgagatcctcgtgcggttcatatcctccccaaacaagtgcgagttcatcaagtcctcggtgaacatcatcgactacgtggccaccatgagcttctacatcgacctcacgctgcagaagtacgcgtcgcacgtcgagaacgccgacattctcgagttcttctcgatcattaggatcatgagactgttcaagctgaccaggcattcgtctggtctgaaaattttgattcaaacgtttagagcgtcggcgaaagagttgacgctattagtgtttttccttgtgctcgggattgtgatcttcgcgagtctggtatactacgcggagaggatacagacgaatccgcacaacgacttcaacagcataccgctgggcctgtggtgggcgctggtcaccatgacgaccgtcggttatggcgacatggcgcccaagacctacgttgggatgttcgtcggcgccttgtgtgctttggctggcgtgctgacgatagccctcccagtgccggttatagtgtcgaacttcgcgatgtactactcgcatacgcaggcgcgcgccaagctgcccaagaagcggcggagagtcatcaacgtggagcccacccggccgcctatacgtgcccccggcgcccccggggccccgggcacgggcccggtcccgccgggcgtcggccaacaagccgtcaaccgacggatgaacgcaatcaagacaaaccaccccaaggacatgatgggacctaacatgggtaatcaccaaacaccggcacagaacacaggcaacacaaattcatcggccgaagtgataaagtcaataagcaacactgcgtcgcaagtttgatgcccggcatggatctctcggtgacgacgcggctgtcgccttgtcccagggacatgagtccagccctcgccatcgccttgcccatgatgaagtcagt

SEQ ID NO: 354 - DNA, 2433 bp, Plutella xylostella
  misc_feature (1)..(2433): Gene targeted: SK - small conductance calcium-activated potassium channel; Universal ID: GS962
ccagtgatgtgttagtgccggatattcagtagaagacttaaatgatttagtttagtgtcaattcgcttaaaaaacccgctttaaatccttgaaaaaaaatctcaaactttttcaaacattatcccaacccgttggtccaaaaccgtgacttaatgtaatccaatatcaatttatatcaataaatatattccatatctctacttcgtagtgtttaatagttcttataatatacctaataactaactatatcactggtgcgaggaccaaagctgtgctaagtactttaactcaactatcgattagtttgaacctttcctaaacaatcgaaaacttcagtagtgtctgtaaatagtggccaacagtgtgtgtagtgcctagtgatattggaaaactcctgaaagtaacaaagaagtttctaactacgttggtggcgaagaatattgattgccggttgaaaaaggtcacctaagtcttgcagttagacctaaattaagaaaacatcatgtccgccccaaccaacgacagtacagaagccatcacaaactctggctacgggagcagcgacgaaactgccagcctcctcattgcgggcccctccgtcaccgtcatagtgccacaagagaacaggacggtcaaacctgttctccaaagacaagactgtactacacatcttcgaccacaactctccggagggccgggcagcgaagaaagtgccacatccatcagagtcgaggaagtgctggcgcggagtgtccctgatattgaactgcagtgccgggaccagcccgtggcagaccggccgcagacgctcgtgtcccccgtcgccgcctgctcgcaccgcgggtcagtcaccggctgccagctagttccgcacgcgtacgcaagatgtcgcatctgcgagcggagacagtcgacggcaccgatctcggcgctacaactagctcgctctatctcacgcgagagcgtccgctcggccgtgcactacccgtgcggctgcagctccctccacgccgtcagcacgtgccccgtcatacaacctcccgccttgctactgcccacgtctagttcgagaatcatccgccagagctcgcagccggagtcgagcgcatgcgcggcgcactgcccgcaccacacccaccaccaccccagcgcctcgctgcggcagctccgggaaccaggcgacggcatcgcgggcatcgccgccgactctctgaggatcaacggcggaatgaggccgttcaaacagcagggactgctgctatgtccacaaaccctgtcgcagacccgacgagcccgattgagacgcgcgttcacagaagcaacgggcgataccgtcacctacgttagaacgctgcgaaagccggtgtcgacgctgtccatccctggagctatgaaggcgtactccgggggggggagggacccggcagctgaggaggcgggggtggcgcttgtcggcgtccacagcgagtatcccagattcggcgaagagcgggcgctcggcggaggcacttacaaaggcgggggggcggccaagcacaaaccgaatataggatataggttaggtagacgaaaggcattatttgaaaaacgaaaacgaataagtgactacgctttagtaatgggaatgtttggtattataattatggttatagaaaatgaacttgcaagtgctggagtttatactaaggcatcaatttattcgcaagcgttaaagacgcttatatcaatgtcgactgtgattttacttggcctaatcgtcgcgtatcacgctttagaagtacagttatttatgatagacaattgcgcggatgactggcggatagcaatgacgtggcagagaatagctcagattacgttagaacttgcaatttgcgcagtccatcccatccctggccagtacaccttcacttggacgactaaactggcgaataagggaggagtcattggggttgaagttgtgccgtatgacgtcacgctgtcgttgccaatgttctttcgtctctatctaatatgcagggtcatgctacttcacagtaaattatttacagacgcttcatcaagaagcataggtgctttaaacagaattaattttaacactagatttgtcttaaagaccctaatgacaatttgtccaggcacagttttactagtatttatggtgtcgttatggataattgccagttggaccctaagacagtgtgaaaggtttcacgatgaagaacacgctaatcttctgaatgcgatgtggctaattgcgattacgtttctatccgtcggctttggtgatattgtgccaaacacatattgtggcagaggtattgctgtaagcaccggcattatgggggcaggctgtaccgcgttattagtgaccgttgcctcaaggaaattagaattaactagagcagagaagcacgttcataacttcatgatgga

SEQ ID NO: 355 - DNA, 1263 bp, Plutella xylostella
  misc_feature (1)..(1263): Gene targeted: chitinase1; Universal ID: GS954
agcaatttcaggtggtgaaatgggtgaatatactcgcgctaaaggattccttgcttattatgagatatgcgaacgcataaaggacaaagggtggatggttcaaaaagatccgttaggacgtatgggaccgtatgcttataagggcgaccagtgggtatcatacgatgacatggatattttgaaatccaaggttaacttaatcaagacaatggaactaggcggaggcatggtttgggcacttgatttggatgactttagaaatagatgcggacaaggcaagcacccactactaaacacaataaagcaaggattactggaccctaaaatatacaaagaaaccataataatatctaagccaatcaacaactttttgaacgatgacctagaagacattgaagtaataccgagctacaccaagaaaacaacgacaacgccgcggccagaagccaccacgcaattagccccgatgcataccactaggaaacctgtaaaaccagcagcagaagaaagatacaaagtagtgtgctattacactaactgggcttggtacagacctgactcaggaaagtacagtccgagtgacatagatccctcattatgtacgcacatcgtctacgcctttgcagtgctggatagcagcaagttaataatcaagccacatgatgtcttcttggatgttgaaaacaaattctacgaaaaagtggtggcactgaagcgtcatggcgtaaaagtgctgctaggactgggcggttggaacgactcggccggggacaaatactcgagactagtgaacagtccttcggctaggaggaccttcattgtgcacgctcttgactttattgaacagtttgagtttgacggacttgacctcgactgggaatatcctaaatgctggcaggtggaatgtgaaaatggtccaagttccgacaagcaaggctttgcaagcttggtgaaagaacttaaatctgctttcacacccagaggactcctactttccgctgccgtgtctcccagcaaacgagttattgacgaaggatacgacgttccggtactatccaaaaacttggattggattgcggtcatggcctacgattaccacggtcagtgggacaagaagactggccacgtgtctcccatgtacgtcagcgataaggacgaacacaaaaccttcaatgtgaacttcacgatgcactactacatgcagaagggcgcgtcgcgtcgcaagctgatcatgggtgtgcccatgtacggacagtcgttctc

SEQ ID NO: 356 - DNA, 4097 bp, Plutella xylostella
  misc_feature (1)..(4097): Gene targeted: ATPase; Universal ID: GS959
atattggcaggtggagcacgccgcgcggaccgcacgcgaatattcacatttcacaatacgtgtttataacataacatatttaaatagtgccttggatgtgctagtgagttggttcagtgttctcgaataattttggtagcattttatttaattgtgctaatgtgaagtttgcacggcattttttaaacgtttactaccggattgaccaaactgtaccggctgcctaaaataataatgtggtggtgcggagagagcgcgcaggatgcggaccgcgccgcggcccccgccccgccccgctcacccgccccgtaggagaccctgccgagtccacaagtgcccttctatagcataacattttctacaccacttttacaccgaccccctagcataagcagttttagtttaacgcgagtgagtgcccaagtgtccatggtgcggcgacatgggaaagtcctccacgagaacacatggccaagagaatgaacggcgaatcaaagcgaacaaccgcgagtataacgcccagttccgatatgcaaacaactacatcaagacgtccaagtacagcgtggtgacgttcctgccgctgaacctgctcgagcagttccagcggctcgccaacttctacttcctgtgcctgctggtgctgcagctcatcccggccatctcctcgctgacgccgatcaccaccgccatcccgctgattggcgtgctcgccttgacagctgtgaaggacgcgtacgacgatttccaacggcaccagaacgactcgcaagtgaaccaccggcgcgccaagacgctacgcaacggcaagctggtcgaagagaagtgggcgtccgtgcaggtcggtgacgtcatccgcctcgagaacgaccagttcgtggcggcggatatactgctgctgagcacgtcggagccgaatggactgtgctatattgagaccgctgagctcgacggagagacgaacctgaaatgccggcaatgtctggtggagacggcgctgatggggcaggacgacgcgcaactcggcgccttcgacggggagatcgtgtgcgagacgcccaacaacctgctcaacaagttcgatggcaccctcagctggcgcgagcagcactactccctggacaacgacaaggtgcttctccgcggctgcgtcctgcgcaacacggcgtggtgctacggcgtcgtggtgttcgccggcaaggacaccaagctcatgcagaacagcggcaagaccaagttcaagcggaccagcatcgaccgcctactcaacttcctcattatcgggatcgtgttcttcttgctgtcgatgtgtgtgttctgcaccgtggcgtgcggcgtgtgggagtggctcgtcgggaggtactttcaggtgtacctcccgtgggacaccctggtgcccgcggagccggcgtcgggcgccgtcgtgatcgccttcctcgtgttcttctcgtacgccatcgtcatgaacaccgtcgtgcccatctcgctctatgtctctgtcgaggttataagattcgcgcagagtttcctcataactgggatgagaagatgtactatgagaagacggggaccgccgctaaagcgaggaccaccacgctcaatgaggagctcggccaaatccagtacatattctcggacaaaacgggcacactgacgcagaacataatgacgttcaacaagtgttcgatcgccggcatctgctacggggacgtggtagatgagagcacaggcgaagcgctcgacctcaacgagagcacagagcctttggacttctcgttcaacccggagttcgaggcggagttcaagtggtacgacggcgcgctgctggcggccgtgaggaggggcgagcgcgcgccgcacgagttcttcagactcctggcgctgtgtcacacggtcatgccggagcagaagaatgggaggttggagtatcaggcgcagtccccggacgagtcagcgctggtgtcggcggcgcgcaacttcggcttcgtgttccgcgagcgctcgccctccaccatcaccatcactgttatggataatacagaggtgtatgatttgttgtgtatattagattttaataatgttaggaaaagaatgtccgtgatattaagaaagaaggatgatggtgaaattaggttatatacaaaaggtgctgataatgtaatatacgacagattaaaagcaagcgaaacagaagtcaaggcgaaaacccaggagcatttaaataaattcgcgggcgaaggtctccgcacgctggcgctggcgtggcggccgctggacgagcgatacttcaacgagtggaagcggcggcaccaggcggccgccctggctatacatgaccgcgacgagcagttggacgctatctatgaagaaatagagacggatttgcaactcgtcggtgtaacagcaatagaagacaaattacaagatggtgtgccagagacaatagcgaaccttagtatggccggcatcaagatatgggtcttaactggagataaacaagaaacagcgataaacatcggctactcgtgccagctgctgacggacgagctggcggaggtgctggtgctggacgcggcggcgcacgacgacgtcgagcgacagctggacaagtgccgcgagtcgctgcgtgtcgcgcacacgtttctgcctcacggcaaaccggacacaaagcccgacggcgacacggccaacggcggcggcggcatcggcaagtcgcccggccgcgccaacgtcaagctcaacgcgcccgccgtctccgtcgtcacatttagtaacgagtacaacagcggccctcactcggcggaggcggcggacgcggcggacgacgccaacgggttcgccatcgtcgtcaacggacactcgctggtgcactgtttgcatcccaagttggaggagaagttcctggacgtagttcttcagtgccgctcggtgatctgctgccgcgtcacgccgctgcagaaggccatggtggtggagctcatcaagaaggcgcgcaaggccgtcacgctcgcgataggggacggcgccaacgacgtgtctatgattaaagcggcgcacatcggcgtgggcatctccggccaagagggcatgcaggcggtcctggcctcggactactccatagctcagttccgcttcctgcagcgcctgctgttggtgcacggccgctggtcctacttccgcatgtgcaagttcctcagatacttcttctacaagaactttgcgtttacggtgtgccacttctggttcgcgttcttttgcgggttcagtgcgcagacggtattcgacgagatgttcatctcagtctacaacctgttctacacgtcactaccggtcctggcgttgggcgtgttcgaacaggacgtgtcggacgtgacgtcactgcagttccccaagctgtacgcgcccggacacaccagccagctgttcaacaaaactgagtttattaagtccacgctgcacgggtgtttcacgtcgctcgtgctgtttcttataccttatggtacttacaaggacgggctggcggcggacggcaaggtgctctccgaccacatgctgctcggcagcgtcgtcgccactattctaattatagataatactacacaaatagcgttagacacaacctactggacggtgtttaaccacgtgacgatctggggctcgctggtgtcgtacttcgtgctggactacttctacaactacgtcataggagggccgtacgtgggctctctgtctgtggcgctaacccagcccaccttctggttcaccgctatacttactatgataatcctcatggtgcccgtggtctcctggcgactggcctgctcgcagtcgcggcccacactggcggagcggctgcgcgcgagacagcggtggcgcgcgggccgcggcggcgcccccgccccgcgcaccccctccgcccgccgggctagaaggagtgtcaggagcggatacgcgtttgctcaccaggagggcttcggccggctgatcacgtcgggcaagatcatgaagcgcatccctcacgcagacgccgccctatccgccctagcgggcaagttccagccgcgcccgccctcgcccgcccccggcacgccgccctg

SEQ ID NO: 357 - DNA, 3188 bp, Plutella xylostella
  misc_feature (1)..(3188): Gene targeted: Vacuolar ATPase A; Universal ID: GS956
acaaaaagcatagactacatcgggtcagctgactaaaattttatcattggtcttgtgataagttgtgattctccgccattctcggtctgtcttttccatctttctcgtcccgtgagttgatttttattatattcagctgttattttacatgtttcatcgactggttcgaagtgtttgtgatatttaactgtgattctataatttacagtgaattcgaaaaacaaggtaattgttcaagatgagtcacgggttgaagaggattgccgacgaggacaatgaaacccagttcggttatgtcttcgctgtgtccggtcccgtggtcacagcggagaagatgtccggctcggccatgtacgagctggtgcgcgtcggctacaacgagctggtcggagagatcatccgtctggagggggacatggccaccatccaggtgtacgaagagacctcaggcgtaaccgtcggcgaccccgtgctgcgcaccggcaagcctctatccgtggaactgggacccggcatcctcggctccatcttcgacggcatccagcggccgctgaaggacatcaacgagctcacgcagagcatctacatccccaagggggtgaacgtgcccgcgctggcccgcgacaccgagtgggagttccacccgcagtacatcaaggtcggcacccacatcaccggcggagacttatacgggatcgtgcacgagaacacgctggtgaagcaccgcatgctggtgccgcccaaggccaagggcaccgtcacctacatcgcgcccgaggggaactacaaagtcactgacgtagtcctagagacggagttcgacggcgagaagtcgtcctacaccatgcttcaagtgtggccggtgcgacagccacggccgtgcaccgagaaactacccgccaaccacccgctgctcaccgggcagagagtgctcgactcactgttcccttgcgtccagggcggtactacggccatccccggggcctttggttgtggcaagactgtgatctcgcaggcactgtccaagtactccaactctgacgtcatcgtctatgtcgggtgcggggagcgtggtaacgagatgtccgaagtactgcgagacttccccgagctgacagtcgagatcgacggcgtcaccgagtccatcatgaagcgcacggcgctcgtggccaacacctccaacatgcccgtggccgcccgagaggcctccatctacaccggaatcaccctatccgaatacttccgtgacatgggctacaacgtgtccatgatggccgactcgacctcccgttgggccgaagctcttcgtgagatctcgggtcgtctggccgagatgcccgctgattccggttacccggcgtacttgggagctagactggcgagcttctacgagagggctggaagggtcaagtgtctgggtaacccggagagggaaggttcggtctccatcgtgggcgccgtgtcgccgcccggaggagacttctctgaccccgtgacggcggccacgctcggcatcgttcaggtgttctggggactggacaagaagctggcgcagaggaagcacttcccctccatcaactggcttatctcttacagtaagtacatgcgcgccctggacgacttctacgacaagaactaccccgagttcgtgccgctcaggaccaaggtcaaggagatcctgcaagaggaggaggacctgtctgaaatcgtgcagctggtcggaaaggcgtccctcgccgagaccgacaagatcaccctcgaggtggccaagctgctgaaggacgacttcttgcagcagaacagttactcgaactacgaccgtttctgcccgttctacaagacgaccggcatgctgaagaacatcatcacgttctacgacatgtcgcgacacgccgtcgagtccaccgcgcagtccgacaacaaggtgacgtggaacacgatccgtgacgccatgggccccgtgctctaccagctttccagcatgaagttcaaggaccccgtgaaagatggagaagccaagatcaaggctgactttgaccagatcgtcgaggacatggccgctgccttccgtaacctagaggactaagttatcacgcgcaattatactctttattcttgaagaggatgtttgggtcggacctcttcccgcgcggtgaaaaaaataaaactgtcaacttaaccatagagctgacagtgtctatggttagaaatagcgcgaaagatactggctactgctaggataggttgatgtttgaggtccgatccaacattgttttgttaataaatatatactattagacctaattatgtgttacggcgcagtccaagtagagtgttttaggtttaaaaatatatttacaaaaaataataatgtatttctgtgaaaaaaaagtcgtgtttcaaatcttgttgaatttcatcttagacgttgaatataagccgttgacggtgtcaatgtatttttttatgtaacacgcggtcactagatactttctcgacaatatgatatatacattttgtaaataaagccccctttccattcaagattgtgtaatgttatatagaggtacatggtgcatcggtctagtggctcgtttgttgcagacagttacgtagttgttaatgattataatttttaaaatattatatactattattattatttatacacagtaaatgatgaattttcgcccaatgataattgaatgattgttttcgtcggttcatataccctgttgcattccagcttatttttagatagttaaaacaacaaatcggttatttttactaataaaaaaaacatacattttatgaaatctttctttttgttttgcttacgtacagtgaatcgttgccatataattatgtatttaatagaatgctgttttagctttttagacggcaatatttttgagatttgagctttcatctaactaacttttaatcatgttgcagtgttcagtattataaattatatttttttcccgccaagagaatgcacgtgttttgaataacattatatcttgtagttcgtacttgcatagctaagtgtttcaataagattatgtacaaaataacgtgttctacgcaataaagtatatgatatctcgctgttttaacttctgtggcgttacgtgggagacgaaagttataaataaatataaagtatacaaattgtaaaaaaaaac

SEQ ID NO: 358 - DNA, 2296 bp, Plutella xylostella
  misc_feature (1)..(2296): Gene targeted: methionine_rich_storage_protein (hexamerin homolog); Universal ID: GS1009
tttcttctaattttttacaaatcacttataaatttttcttaatatttgtgatcatttatgaacacactcctcaaccacctgctcatttttacagcacccacttcctagacttcataaaatactcgttatccccattctcgatgacatgcttcctttccatgtataaatctaactttctcttgtcctctctttgcagttgacaatgagttcatcgccaagcagaggaaggtgctgtcgctgctgcagcacatcacgcaggtgaacgtggacgccgagtactacaagatcggcaaggaatacgacatcgagcacaacttcgaacactacaccaacaagaaggccgtcgaagagttcctgacctactacaggcatggcatgctcccccatgacgccatcttctccgtctacaacgaggagtgcagggacgaggccatcgccctctaccacctgttctactacgccaaggacttcgagaccttctacaagaccgccgcgtgggcccgcgtctacttgaacgagggactcttcgtctactccttcagcattgccgtccagcaccgtgacgacaccaccggcatcgtcctccccgctccctacgaagtctacccctactacttcgtcaactccgatgtcatcgctaaggtccagggcatcaagatgcagcgtttcttcatccccaagtgggtcgccccttacttcagcattgttgaggagaacaacgttttcaacatcggcgccaactactccggctggttcaacaacgtaaaccaggaacagaagctgtcttacttcaccgaggacatcggccttaacacttactactactacttccacaccagcatgcctttctggatgaacggtgaggaattcggagtcctgaaggaacgcaggggagagatctacttcaacttctaccagcagctgttggcccgttactacttcgagcgtctgaccaacggacttggtgagatccccgagctgtcctggaggtggcccatcaagaccggctacgtgccccacatggtcaaccacaacctgcagccgttcgtgtccaggaacaactactaccagatccagaacgaagacaacatgcgcgacctcgaatacttggaatcctacgagaagcagttcctgcaatacctggaagctggcaaattcaaggcctacaacaaggaagtcgacttcagcgactacaagtccgtcaacttcgtcggaaacttctggcaatccaacgctgacctcaccacccccaggaacttcgagcagtactacgagatcctcgcccaggtccttcttggcgctgcccccaagacctctggcaaatactccaccgcccccatcgtcctgaagcactaccagaccgccctccgcgaccccgtgttcttccagctgtacaagcgcatcctgtactacttcctgcagtacaagcagtacctcgagccctacaccagggagaccctcgaattcaccggcgtcaagatcaacgacgttaaggtcgacgacctcgtcacctacttcgactacttctccttcaacgtctccaacgctgctttctacagcaaggaggagctcaccaacgtgccttactcttacctggtccgccaggcccgcctcaaccacaaggctttcgacgtcaagattgaggtcaagtctgacatcgccgctgacgctatggtcaagatcttcatggctcccaaatacgacagcaacggctaccccatcacccttgaggacaactggatgaacttcttccagctggacttcttcaagaccaagctgaaccagggcaagaacgacatcgtccgcaactctgaggacttcttctacttcaaggaggactccgtctccaccaacgagctgtaccgctacctggacaacggaaaggtccccactgacatgtccgagtactacttcctgctgcccaacaggctgatgctgcccaagggtacccactctggcttccccttccagttcttcgtgatggtctacccctacgtgcctgcccaggacgctggtgactacaagaactacatcctcgacaacaagcccttcggctacccgctggaccgccccgtcgacgagctgtacttctaccagcccaacatgtacttccaggatgtgttcatcaagcacgagggagaggagaacgtgcaccagtacatggtccccaaactcgaccacctcaagaacgttgttgccaagcactaagaggagagagaaagagctatgtgatgccgaaacattcacgtttgtgaatatatagattacctacctatttattatatagtaatgtgtg

SEQ ID NO: 359 - DNA, 2489 bp, Plutella xylostella
  misc_feature (1)..(2489): Gene targeted: chitinase; Universal ID: GS1001
cacggacacgcaacaaggcgaatcaaaatgcgtgctcttctgttgacggcgttcgtggccctggcatgctcctcagttcaggcggagtcaggccgcgtcgtctgctacttcagcaactgggcggtgtaccggcccgggctcggccgctacgggctggaggacattcccgtggacctgtgcacccacatcatctactccttcatcggagtgactgagaatactcacgaggtgctcgtcatcgatcctgagctggatgtagaccaaggcgggttccgcaacttcacctcgctcaaggccagccaccccaaggtcaagttcacggtggccgtgggcggctgggcggagggcggctccaagtactcacgcatggtcgctgacaagaagtccaggatggccttcgtcaggagcattgttgacttcctcaacaagtataacttcgacggtctcgacctagactgggagtaccccggagcagctgaccgcggcggctctttctccgacaaagacaagttcctgtacctggtgcaggagttgaggcgagccttcctgagggtgggcaagggctgggagctgaccgctgcggtaccactggctaatttccgactgatggaggggtaccatgtgcctgagttgtgccaggagctggacgcgatccacgtgatggcgtacgacctgcgtggcaactgggccgggttcgccgacgtgcactccccgctgtactcccgccctcacgaccagtacgcctactccaagctcaatgtgaacgacggcctcaaactgtgggaggagaagggttgcccaaccaacaagctggtcgtgggcatcccgttctacggtcgctcgttcaccctttcgtatggcaacaccaactacaacctcgggacttacatcaacaaggaggccggtggtggcaaccctgcgccctatactaatgctacgggcttctgggcgtattatgagatctgcacggaggtgaacaaggagggctccaactggaccatcaagtgggacgagcagggcaagtgcccctacgcctactcgggcacgcagtgggtcggctacgaggaccccaggagtgtcgagatcaagctcaactggatcaaggagaaggggtatctgggcgcgatgacctgggcaatcgacatggacgacttccagggtctctgcggggagaagaacgcgctcacgaagctgctgcaccagcacatgtctccgtaccaggtgcctccgcccaaccctggatctaccacgcctactcctgaatgggcgcgcccaccgtcaaccaccccagacccatacgaagacgtagtcccggccgggaacaaacccgcgaccactgcgcgaccccaggccaccaccaccactaccaaacgcccgactacccccgccgttgccatgacaaccaccaccacggctagacccactgaggcagcgaccgtgtctacggctgctactactgaagcctgcattgatactgaggttcctgaggttcctgaggagaatgaagtggacgctaatgacgtttgttacgcacaagacgattacatggcggataagaaggcgtgtgataagtactggcgttgtgtgaacggcgagccggtgcagttctcttgccagccgggcaccgtgttcaacgtccaattgaacgtctgtgattggccagacagcgccaacagaagtgactgccagatgtgagctagtagcaacgtcatttagtaaccaatgctcggtatgtatgaaattatggacgtgtcgtcgcggatgtcaatacagaccgagcattggatcgcgttctcggctaaattgtacaactataacacccgaatgtaaatcttcgaacgcacgtttttacatacaaagtttaggggttatacgttataataggttgtcgttttacagttgtagttatgtgctcaaggttcagatttagttcagcgggtctttataatccacaaaatgctcaactaagtattagtaattacttattacgtacttgtacatacttacttaagtacctacaattacaacctaataaaacatgtttggaaatagtgtcacgcaaatataaggtgccgctgaaataaatcaacatttactagttttaagtttacaataagtgctaagaataatttattacagcttttagcattgccgtactaagtaattgtatgttcttacaatgaactttttacgctaatgttacacattctttaaagttaagtaaaagttaaaataaggagttatttgctatttccaatatattcgacttaaataatgttaaatgtgtgttcagtaaataaattttgacttctacataagtcaagattgtatttacaatatagggacgtaaactaagactgcatttaaaaatagtgtaatttgtaaaatacaaaacatgtacttagttaagtatacattatatttatttaaataaaattttgtatacattattcaacaaattaataataaatatttaattgactttgaaa

SEQ ID NO: 360 - DNA, 762 bp, Plutella xylostella
  misc_feature (1)..(762): Gene targeted: troponin; Universal ID: GS1249
agcgtatggaggaggcctccaaagccaagaaggcgaagaagggtttcatgacacctgagaggaagaagaagctcaggttgctgctgcgtaagaaagccgctgaggaactgaaaaaggagcaggaacgcaaagcggccgagaggaggcgcatcattgaggagaggtgcggtaaacccaagaacgttgaagatgcaaacgaagatgcgcttgtgagggtttgcaaagaataccacacccgcatcggacagctcgaagacgagaagttcgatctggaatacatcgttaaaagaaaagatatggagatctcggacctgaactctcaagtcaacgaccttagaggcaaattcgtcaaacccacactaaagaaggtgtccaaatacgagaacaaattcgccaagctccagaaaaaggcggccgaattcaacttccgtaaccagttgaaggtcgtcaaaaagaaggaattcacccttgaagaagaagacaaagagaaaaaaccagactggtccaagggcaagccaggagatcagaaggtaaaagaggaagaggttgaggcatgaactgtaactcacccccacctactgtaagacctgtactctaagtcaattgacaattgttattaactatcagcacattgtgatatgcctaccttccatggtccgtccgtgcactgcggacgcaatcaccctgtaggtatctaccaacaagttcctccatttgttatctgtgtacttgtcgattgaacacatccatttcgaacatgtc

SEQ ID NO: 361 - DNA, 1448 bp, Plutella xylostella
  misc_feature (1)..(1448): Gene targeted: P102; Universal ID: GS1256
aaaacacgtactaggtagcggcgagtgttggcattattcataggtagcacttgaaggccgcgtttgtttaccaaggtgctagacacattgccattgctcattcagggaagtcgcgtactgtataaactggaaatctgtgtctcaagtttaaatgatcacactgtatatacccgatctgggagcgcatgacgtcagcgcatagaggtcgggccgtatcgctggcacgagacagagttcattagagcgtcgcaatcgcggctcaaacaccgcgcgggatacatcatcatgaaggcctggattgtactggtgctttgtgtggcggtggtggtccggggggatgacctggcgcacgccgccgggcagatcttcaaccagatcctgcccaacctgatcggcaaccaggtgacgggcgggagcaaggacccgaccaccaacacgctcaaccagatcggcacggtggtcggcggtgtcgtcgactacgccaagaagaagggctatgaagacatgctgaagcagatcaaggagtccaccaccgacgaggacctgctcaagctcagcgaggagatgttcaacgcggacgtcaacaacgcgctcgcctacatccaggtcaacgtgcaagggaaaaccagtcctatgtccaagaacgacgaggcctcttccaacctcttgaacgtgcctgaaaatgtgtggaatggacctacaatcaaaccgtttgtggcgctgttcgataactaccataagaacgtgattcgcccggagttccagacacccactgaagagtcggaacagacgacgttcatcaacacgatcctggccacggggcctatcagaagtctcatgtccttcttcgtaaacaaaggcctcacccagctgaacgagtaccccgagcaagtggaactgctgcgcaagctgtggttcacgaagtacgcgcgccactggaccggcctctgcaagtgcagctgcgcttttgaaaacgtattcatggctgaactcaagtctaacactgttttgggtctgcacagctggttgttcttcgctaagcgagagttggaccacaaggccaactacttgggttacatcgataaattggacctgggaggaaaagggctaatcctcaagcagcactcggtcctcagcgaaacaaaagacgctcccgagatcacgatgttcgtgggcacatctccggagctggagacagctctgtacaccctgtgctacctcgccaggcccgaccagctctgcaagctgagggctcctaataatgtagcttttagcatacagactaagaccatcagggctgataacctgcctgtcattgatacggcttcgccggttttctaatcagtgaattgtattagaattaggcccagttttaccatactctgttagatcataacaagggattagttcatcaattatacgtcatcttcatattgaattcttgacag

SEQ ID NO: 362 - DNA, 487 bp, Spodoptera frugiperda
  misc_feature (1)..(487): Gene targeted: sd; Universal ID: GS921
gtgcgtgcaatggtgcgctcatttaattttacacagtgttaagtttatgtgcattaaatagtatttagtttcaagacatgaggtaggaaaatattatcttagataataaaaataagagatttttgtatttatttgatagagttatattagataaattgtaaagtgattagctataaggttcttttttatatggcgatagtcgttcaggaacttatccgtgaagttgtcacatatttagtacttaagagaaacttaatttttgttgcaattgtagattcctctgtccaatactctgtaatgtatgatttgtttggtcgaaattatccttttccacgattgttaaagaaccgtacgacaactttgatgtcttctatttgcaatacgacggcgtgttcaataattagtgaaaaagatctgccctgttgtgattttatatttttaatgttaaatatgtactcaatgaaatgagattaactcaatgttattc

SEQ ID NO: 363 - DNA, 488 bp, Spodoptera frugiperda
  misc_feature (1)..(488): Gene targeted: Rfabg - Retinoid- and fatty acid-binding glycoprotein; Universal ID: GS985
acaccacgacccagacaccgaacacgccatgagggaaatcatcgcgatagcacatagaggtatttttatagtgacagactgaaaaagcgtactaaaagacgaaaatgtgacgaagactaaacgcatcgcgctgaccaaaagacctgttctgaataacgacccaggctgcatatgtcatgagagaatcaaatatatatatttagacgaagactgatgacttaaaatgacaaattatgcataagaacataaaaacagagaaaacgtaatgacacaggtttttctttaacattatcaataatactataaactttgcaatcctgcttgtagcaccttattacaacagagtagaatactaaaaacaatttgatactttaattgagaataaaacaacacgtaaaaaagatctcattccattgcgtattccgtacggaaggaccatgttacgccaatacattgaagctcttgtacgcgtaacaattttatagtgc

SEQ ID NO: 364 - DNA, 488 bp, Spodoptera frugiperda
  misc_feature (1)..(488): Gene targeted: Rpb7; Universal ID: GS922
gtggagggcacatgtacaggaaagtatggtttcgtgatagcagtgacagcaatagacagtataggagctggtctgatccagccagggcagggctttgtggtgtaccctgttaaatacaaggctatagtcttccggccattcaagggagaggtccttgatgctattgtcactcaagttaataaggttggaatgtttgcacaaattggcccattgagttgtttcatttcacatcattccatcccagctgatatggagttctgcccgaatgtgaatcccccatgttacaaaagtaaacaggaagataacgtcatacaggaagaggatgtcatccggcttaagatcgtcggtaccagagtagatgctacaggcattttcgccattggaacattgatggacgattacctaggattagtaacacagtaacatttatgaataaaataaataataagtgtacaaatacaaaatattgtttttaataaagaaacgaa

SEQ ID NO: 365 - DNA, 402 bp, Spodoptera frugiperda
  misc_feature (1)..(402): Gene targeted: calypso; Universal ID: GS924
tggcccttgggcgactgatgaagactggactgataaattcaggagagtgatggctgagagactcggtagagatgctggagaacaagttcatgacataagatttaatttaatggcagtagtacctgaccgacggatagcattgacacagaaactgaatgcactagaaatgaatcagaaaagagttaaagaagcaatatcaaagattgggaaacatttgcgacatttgttatcaaagcgcagagaggttactgaggaaggagaatcactctcagaagaaagcaacgagaattccctaaatgagaatatagtgcagatcagtgaggaaacaatactgactgctttagaatcatctcagttgcagttgtacgatgtagactacactcgtcccatcaccattgagat

SEQ ID NO: 366 - DNA, 440 bp, Spodoptera frugiperda
  misc_feature (1)..(440): Gene targeted: Rbm24; Universal ID: GS917
ctcccggagctttcacagttgaaaacataagattcggtccaatatatagaattatatacattcattatacttttaaatgtaagtagaataatattttaagtagatgcgtactaaaggaacagttagccatagacgtggccatcttgccttatatagatgaaatattgtacttagttatatattacactaaatatatacacatatcatcaaatgtataaattaaatatcagagcggcatctcgcactgaattgtccataatagtgcatttcattcacagtaattttaagcacaataactattatattttatgtattgcataactataaaatgaacgtgaattcataataaatacttaataactgttataattactttaaattataatatcgtacttaatttaggttaatataaataaaatggaaaataaatttttaaggta

SEQ ID NO: 367 - DNA, 480 bp, Spodoptera frugiperda
  misc_feature (1)..(480): Gene targeted: twisted bristles roughened eye; Universal ID: GS919
gagccagtacgtgttggagagattgtagtattcaaggtggagggacgcgacattccaatcgttcacagagttctaaagcttcatgaaaagaacaatggtacagtgaagttcctaactaaaggagacaacaacagtgtggatgatcgaggcttgtatgctcaaggacagctgtggctcactaaaaaggatgtagtcggtcgtgccagaggtttcttgccttatgtcggaatggtcacaatttatatgaatgaatatccaaagtttaagtttgcggtactggcgtgcttagcaatgtacgtgttagtgcacagggagtgacagcattaatttgatctgaagtgttgttaagatggccgtctaaagagatacaaatggctctgtggatgtatttaattttatgattaaatgaaagttctctctagtgttacttaatgtaattgttttacttaaatatatggtttttattacattatttattgc

SEQ ID NO: 368 - DNA, 488 bp, Spodoptera frugiperda
  misc_feature (1)..(488): Gene targeted: surfeit 4; Universal ID: GS923
atgctgcgctcaagcgtgccaaaccataaactcccttccttcccgcgtagacgtgatgtttccttagcggtcctctcctctgcctttaagtgtatctactcagactgaaccaactcctgctttcattctcttcgcgttacatttttcattccattatgtttcttgttgttgtgattcaatgtaaatatttatatgaaattatatctattttgtacttactgactgaataaccgactacggatctttgattgtaaacgcaaatgctctttttatgaatttgaatattccagtagccataagtgaaactttggtatcacaattcgaagatttgtgtttcatctacctaacgaaataataaaatgtagtcatatacaaaataattatttgatttatcaaaagtatttaaaagacacatatttttgtattattttttatttattttcttaagtttcagtttggccatagttataaagattcctgaaaagatt

SEQ ID NO: 369 - DNA, 486 bp, Spodoptera frugiperda
  misc_feature (1)..(486): Gene targeted: Rpn7 regulatory particle non-ATPase 7; Universal ID: GS925
tttgcaagttgtagaagttgaatgagacgagaaatttattgtgattcgagttgtgttgattatatttcgtctttattacgatagtattactaattactacaagtcataatcaaagatggagctctcagctgaaggtaaaacccctgaatacatggcattggccggaatcaagttcaagcttagtttgcctcacttgaaagatgatcagcagctgaaagagcagctcttccaaggaatcaagagtggacatatggctccttactataaagaggtctgtactgaccttggatggaagttcgaccagaagttgtatgatgagatggcaaaagagaaccaggacaggttagccaagtttcaagaggatgattcagagactccagtgtggcaggacaggttggactacctctgttcaataggtgacaaagaaggtgcaactgccctggctgtctccaaatatgaagattccacactaaccacaaacagacg

SEQ ID NO: 370 - DNA, 488 bp, Spodoptera frugiperda
  misc_feature (1)..(488): Gene targeted: how - held out wings; Universal ID: GS986
cgcaggcgcagcgctatattcacccacaacttcacttcggtcaacttcgactagtggtgatcgaaacttcgatgtgtgtggaagtgaatttaacttttctaacataatctcacaaaaataacaataatcagtaactaaagtacaattatcttatttgatcgtgtcggaataaacatttaacgtgtcgttagttatataaatagtattcatgatgtgtgataataacagtccttcgacgcaaagtatagcggactacttagctcagttgctcaaagacaggaagcaactggctgcgttcccgaatgttttcatgcacatggagcgacttctggatgaagaaatagcaaaagttcgagcaagtttattccaaataaatggagttaagaaagaaccactcgttctaccagagcccgaaggcgtggtcaccacactcacagaaaaagtttacgtgcctgtaaaagaacatccagatttcaacttcgttggaa

SEQ ID NO: 371 - DNA, 458 bp, Spodoptera frugiperda
  misc_feature (1)..(458): Gene targeted: Phenylalanyl-tRNA synthetase beta subunit; Universal ID: GS926
caacaaaatactgttggttttttagcatacaaaaataaaacatgcgtacctagacagtgagatagaaaagaacaaaaacatttagcatgcaatatatttttaatttcttattagactgacgttggcattatatctagacgtgccagctgatgagaaatatcaaagttgtacgatacttgtacttttgttactaattaaatatatttgtcgcacatactataatttacaatgccgactatatcagtgaaacgtgactctctatttgccgcacttggaaaaacttacactgacgatgaattccaggaactttgtttcgaatttggcttggaactggatgaagttacaacagagaaacagatgttaatgaaagagcaaggtgagcatgttggagcgggagtatcagaagagatcctctaccggatagacatcccagccaaccgatatgatctcctctgctt

SEQ ID NO: 372 - DNA, 341 bp, Spodoptera frugiperda
  misc_feature (1)..(341): Gene targeted: twi; Universal ID: GS918
tccgtgtggaggatggagggagagtggacacacggacaaacgtgatacaccagttaccgtgtactcctagggaaacttgaaaagacgcttatattattccattgtaggtattattgattctgtggcaagtgatgtgtaaatggtgaacaaattagttcttaattagtactagtaaattgaatatgtgatagttaattaagtggattagggacttaagctggcattaactgttgataatttatattaagtgtgaaacaaagacgatatttagaattaatgatttatttgattaaaattgtagtggcaacaatacatacagctgtataccaaaaacttgagta

SEQ ID NO: 373 - DNA, 488 bp, Spodoptera frugiperda
  misc_feature (1)..(488): Gene targeted: mbc; Universal ID: GS920
ccgcgacagtttcagcatggactctagcaacaactccaataataggatgtctgatatatctactggcactgaaacatcgacgaaaggaaggttcttcagtttcaacgctgctatcaatcctttgactaggaatagcagtacgggagtcgtcagtcgctttgcaaccttgcagagttcaccgggcagaagaaataaacggaatcttagaaagagcgaagtgggcacccaagcaagcggttcacaatggtacacgtcccacgcgacgccaaacggctcgttaaacaacagcacattaaccgtcaacaacacatcaatcagcaacaacaacaacagtataacgagcatcaacacacagaccgacacgccgtccgcgtcacccttacgagaattgaggcaagaggtgagaaaagtttccaaggtaaattgtatccctgaggaggttcccaccgaaaggttaataattaaaaagattcattacaatctggtga

SEQ ID NO: 374 - DNA, 470 bp, Spodoptera frugiperda
  misc_feature (1)..(470): Gene targeted: psc - posterior sex combs; Universal ID: GS868
cgttcccctagctcttctccaaaattagtaatagctgaagaaaagcaagcaggtagctctggttcagaacaaaatcagtcagatcagattacaagtactcaaatacccagtatcaacacaaataatgaacagttggcagtgccacctgggacttcaaaagctggactaaaacctatgcttccagctggaaggataccaggaataagacaacctctaccaacaattcaaaaaacaagtcctttgcctaacttacctgattacagactgtctcaagcacgacaacctttgatttcaccccaacatgtgttattaagacatcatatggaagtaaatgcgtggatagaagcccaacgacaattggagttgatcaagagtatgtcaacaaatattgctcaccagtcacagaatgacttcaacaataaggacaaacagtaattagtttttgctacccaattaacaattaattactt

SEQ ID NO: 375 - DNA, 488 bp, Spodoptera frugiperda
  misc_feature (1)..(488): Gene targeted: Upf1; Universal ID: GS872
ctgattggtgttatcgttccacatacacatttgcaccaattatcaatcagtttgtaaacggaaacaaaccatgtgctaacatggcgatttttcatcgttcttcgcatgtcgtttgataattattgcgtggctgttatgggaatttggtttaatcgtgcaatattttatctttttgacacattttctttgttttgttcaatataattatatcggggaaaaatgagtgtcgacgcttatggaccgagctcacaaacactcacgtttttggatactgaggaagcggatcttattggggctgatactcagggctcggaattcgaattcaccgacttcacccttccatctcagagccaaacacaggcctcccaacatgatcatggcttgtcatcttcaaatcaggtgaacggtttgggtcgttctgatttgtcatcgaaagtgtccaatgtgactaatgctatagcagagttgcaatttgaggaagaagatga

SEQ ID NO: 376 - DNA, 267 bp, Spodoptera frugiperda
  misc_feature (1)..(267): Gene targeted: sr; Universal ID: GS870
gtggagcgatctcgcattgttgcattatgttttacattcacacaatcccgtgcttcgatcacacgaacacttcatcttaatatacctagctcttaaaggactttcaacaaatacgatatctaacttttatggtgttcacctgatagtgaatggaaaacgaattctttatgaaattgtggatgattattgtttaagctattttatgtatttcacccgagtgaaagatgttgttgatgttctataaatataactagttataagtaggta

SEQ ID NO: 377 - DNA, 412 bp, Spodoptera frugiperda
  misc_feature (1)..(412): Gene targeted: Fit1- Fit2; Universal ID: GS867
tacgtgccttgatcatgtgctaaactttggatagtgtagaaatatttttgtaccaagaaaatgcattcgtaataatcttatttcttcacaaaatattgttttctagatctaattataatagtgcttccaataattttcgtatgtaaatgccaaatacattgacaaaataaaatgcttttcatactttgcatcacttttatttaatagtagaatttaagaaacatgcgacggatatgagcttttaaataatgtaagtttttgtttttaatatttttttatgtaacatagtaacattgggtccttgtagtgccattgtgacataataacatggatgtcaaatgatccatttggtgctgtatcattcaacataacattgagtggccttaacatattatattatgatacattataa

SEQ ID NO: 378 - DNA, 475 bp, Spodoptera frugiperda
  misc_feature (1)..(475): Gene targeted: RRM domain-containing protein; Universal ID: GS869
gttgtgttgatcagttgtccaacaatatttgtgtcgtttttccgtgttacttactataaatagaacaatattataagaaatttaaagcaattacgagaagttaaaagtaatataaatccaaacctccaaaatggatagagaagacggtgaaatgagtgatgataacgcaatggtggttgatgatgtaaaagaaccaatttcatacactgatgattgtacactggtgtacaaagctgacaaggcaggattaatcgtagaaaaattggaaaaagtggatgcctctaagatagaggaacgagcaaaaagatttggtttaaatcttacaggaaatagagtaattacacagagacagattgatgaactttattccaattttggtatagaaagtggaaatgagagacattttcgtttcgatgcaatcaatttgcatggagttgatggactttctacaaaggaaatatttcaatatttagaa

SEQ ID NO: 379 - DNA, 482 bp, Spodoptera frugiperda
  misc_feature (1)..(482): Gene targeted: Tc croc; Universal ID: GS866
aagacatggtcaagccgccttactcttatatagcacttatagctatggccatacaaaacgctcctgaacgacgtataactctcaacggtatttaccaatttattatggaaagatttccttattacagagaaaacaaacaaggctggcaaaattccataagacacaatctaagcctcaatgagtgctttgtgaaagtggcaagagatgataaaaaacctggtaaaggcagttactggacgcttgatcctgattcatataatatgtttgataatggctcgtacttacgccgtcggcgtcgctttaaaaagaaagatgcgcttagagaaaaggaagaagctttaaagagacaacagcagttacaagaagctcaggaggcactcactgcgcaggaagcactgactgcatcggacactctaggacaacaacgtgatgttaagcctgatgtcaaaccaagaatcttcgaatgtcgaccgaaacgagaa

SEQ ID NO: 380 - DNA, 488 bp, Spodoptera frugiperda
  misc_feature (1)..(488): Gene targeted: Protein kinase; Universal ID: GS877
ggcattagcgctgaacctgtaacagaggaagatgctaccagctatgttaaaaaggtggtgccaaaagattataagactatgggtgctctttcgcgagctatagcttcaaatgtactctttactcatctggatgaatctgagagagcagatatgttcgacgctatgtttccagtacagtgtcttcctggtgaaactgtcataaggcaaggagatgaaggagataacttttacatcattgattcaggagaagtagaagttttagtaaatggtgaacctgttacaactattggagaaggaggcagttttggtgaattggctctaatatacggcaccccaagagcagcgacagtgcgtgcaagaactcctttaaaactatggggtttggatcgtgattcttaccgtcgtatacttatgggatccactataagaaaacgacgcatgtacgatgaattcttatcacgcgtctcaattttagaaagtttagaaaa

SEQ ID NO: 381 - DNA, 487 bp, Spodoptera frugiperda
  misc_feature (1)..(487): Gene targeted: Arp3; Universal ID: GS876
gtgattgtaccgcacccactaaagttttccttaaaattttgctgtaatttgaaatagaacagtatttagtgaaattagaaatatgggtgatcatctaccagcttgtgtcatcgatgtcgggacgggttacacgaagctgggctttgccggcaacaaggaaccgcagtttatcattccgtcagccatagcgataaaagaaactgctaaagttggcgatcaaagcactcggcgtatgactaaggcagtagaggacctagatttcttcatcggcgatgaagcgtttgacgctaccgggtactctgtgaagtatcctgtacgccacggtctagttgaagattgggatctaatggagcgttacattgaacagtgtatcttcaaatacttgagagcggaacctgaagatcaccatttcttgctaactgagcctccactaaacacgcctgagaacagggagtacctagcagagattatgtttgagtcattcaat

SEQ ID NO: 382 - DNA, 488 bp, Spodoptera frugiperda
  misc_feature (1)..(488): Gene targeted: Actin related protein 2; Universal ID: GS878
ggggggttgtacttcgtctgttattttcattaaatatttcaatataaataatattttaagtagaaataatataaattaagtaaaatggatgagaaaggaagaaaagtcattgtttgcgacaacggcacaggcttcgtgaagtgtggatatgcggggagcaacttcccagccttcattttcccgtcgatggtcggtcggccgatcatcagggcggagaataagatcggagacattgacgttaaggacttaatggttggagatgaagcatctaaactcaggtctatgctggaagtcagttatcctatggagaatggagtggtccgcaactgggaggacatgtgtcacgtgtgggactacacgttcgggcccagcaagatgaacgtggaccccaaggagaccaagatattactcactgagccaccgatgaaccccaccaagaatagggagaagatgattgaggtaatgttcgagaagtacgagttcgacag

SEQ ID NO: 383 - DNA, 380 bp, Spodoptera frugiperda
  misc_feature (1)..(380): Gene targeted: TAR DNA-binding protein 43-like Protein; Universal ID: GS865
cctctcttggatgcaacaaggtaattctgcacagggaccctctagtcagtggggacagcggcaccagtcccaaggccactctgtttgatccatcatctggttgaaagctcacaataatttctgtgattgtagcaacaattagataatttatcatttgttttatctacactatacaaaagggttgttctaatggtaaagagagtggtttaaatacatagtttgctactgatgttatttatttattgtggagttgcttgtgtttcgttgatttattcaaacttatataattatattataaataaagtagattacagtatcatggaatgaacgttacacactagataattttttatatgtacattgtgtacatataattagtt

SEQ ID NO: 384 - DNA, 384 bp, Spodoptera frugiperda
  misc_feature (1)..(384): Gene targeted: wb; Universal ID: GS884
ttcggccctgaactccatctataagcccctacgttcactctgtcgtactgtaagcgtattgtaattgcaatacgctcgtgtgacgagagaaccacgtacaatctattatacttaagaaagtttgtatggatgtatcctaagaagtgaataataataataatatgttccatacgatagctcaatgtcgttgcaatacgcttacgaaacgacaccctaaagattcatttgcgaagtgcctgtattttcattacacaacaacgtgtatttatttcataatataagtattttaatcgatttttactcaggagatttccctttatgcacttagacacacaccaatctaaagaaatgacgctgtataataataaagtccaattttagtaa

SEQ ID NO: 385 - DNA, 428 bp, Spodoptera frugiperda
  misc_feature (1)..(428): Gene targeted: TC004745; Universal ID: GS987
cccgtgcggcagctgtgtacatctgtatcatttatttttatacaattttaactgacatattgtcgaaaaactgtaggttgtagctgagatgaaaacgtttattaactttgtaggtttttaaaaaattaacaaattaaattcggggacatattattattttgacagtgttcattaattatcatgtagcatttatttacactgacaatttagcttgcgtttgcaatgttttaaaattccaagttcttgagtcatatttttatatcaaattgtgtgaaatgtacggtcaaccgcacattactggtaacattttggtaccaaaagtgccttattgtaactgtacgaataaagtctaataaatatctaccaacgatgtgtgtttgactgtacatgaaatagaaaagtacaatttttgtattaggaatcgtcct

SEQ ID NO: 386 - DNA, 483 bp, Spodoptera frugiperda
  misc_feature (1)..(483): Gene targeted: ara; Universal ID: GS873
ctacggatatggagccgggtacgatttagctgcgagacggaaaaacgcgacacgagagtcaacggcgacactcaaagcgtggctgaacgagcacaagaagaacccatacccaacgaagggcgagaagataatgttggcgatcatcaccaagatgacactgacgcaggtgtcgacgtggttcgccaatgcgcgtcgccggctcaagaaggaaaacaagatgacgtgggagccgagaaacagggtcgatgatgatgacaataataatgacgatgatgaccataaaagcaacgatggaaaagatggactagatggaaaagactcaggaaccggctctagtgaagacggagatagacctcagcaaagattagatatgcttgggcaaaggacagaatcagaatggtccgaatcacgcgctgatagtggtcccgaatcacctgaaccttacgaaagacctattcacccagcctatcagcatttaccttc

SEQ ID NO: 387 - DNA, 414 bp, Spodoptera frugiperda
  misc_feature (1)..(414): Gene targeted: Mef2; Universal ID: GS885
ctcgactgtacgctcgtactagagtcagaacgatgcctataatatatttctgtatcacattttgtcagtgaaactgtataaatgtgtctataattataatatataatgtgtaattaagagtaacgaacaagttcacatcatagaatatatcactagagtaaaccttcaaatcacagtaacaaaatgtaaacgtacacttgttaaatttgtacagggagttttccatgtttgaggttcaaaagtctgaacgcatatgaatattatgaataaaaaaataaaatgtattttcgcattgtaacataagtacacggttaggtttaacgaattaatattttattaccggatcataatggatgttgacctgtttatagggaactatttaaagatcatgtaagtacatcttgaatgttaggc

SEQ ID NO: 388 - DNA, 402 bp, Spodoptera frugiperda
  misc_feature (1)..(402): Gene targeted: FA elongase; Universal ID: GS883
tagttaatctgaccaggacatcagctgtccgactctaacatatagtgaatgtgcacttgtacgactcggcctggaggacttactgccgaaataggacctcgccggtctgacagatcgatcactcagataagctaagcgaacggaagacaaaattgcctcggaaaattgtacctagtttaagaaatcgacacaatggcgctagggataatgctacaagctataagcgattttcaatattatatggacaaatatggagatcctaggacaaatccatggttcctgatgagttccccatttcctacattattaatatgtctaagctatgtctatctagtcaaggttttaggaccacgatttatggagaatagaaaaccctatgaactaaaaaatgttctaatatta

SEQ ID NO: 389 - DNA, 340 bp, Spodoptera frugiperda
  misc_feature (1)..(340): Gene targeted: Uncharacterized protein; Universal ID: GS875
gcaaggtacgttgctatctaatattactcaacatttccaccaaacttgttagtactatttcgcacctttaaacaattctatttgtcttaggtaatttggtggcggtagggaacggattttaaagtaacgactatttaaatctattttatagatataaacataaatgttttataaatttatataggcactatatctgtagttaaattgtttatggatttaggtttactgtaggctggcaataagtatattttactttgaggaatacagcgcaataagtgctatgttacgcttcgtagcatcgatgtttatatgtaacatatttttataaaattataatgtg

SEQ ID NO: 390 - DNA, 468 bp, Spodoptera frugiperda
  misc_feature (1)..(468): Gene targeted: Translocase of inner mitochondrial membrane 23; Universal ID: GS880
atatactagtggagtcggcgataagtaacaatacatacatacaaacatacataatgcttaggcggatattatacaataccccacccatagtccagtcgagccaatggaagtcataataagagtagaaaatctaacatagtgcaaaaagaacagagtaacagacgatttgtgacatcaaataaggtcttcagttactaatgaaaaatgacaaattgttacataatacaaccttttacctgacccactatgataaaattaatttcggggtgtaatggaattgatcatggaatacgaaatttctttctgcgataacaattattttctcgttcaaaacctcttgacactggatattgccgtcagactcgagtataccgaccaaacaagccacacccgcataaaatgctcttacaagttatcgtttatcaaagacaagtgggtcagatagtccagtagaatccagttaagatc

SEQ ID NO: 391 - DNA, 377 bp, Spodoptera frugiperda
  misc_feature (1)..(377): Gene targeted: Pax2; Universal ID: GS879
ccactgaggccaagtctgggtatccttacttaggacaacttggtggtatggacatgggcagagtacactagacaaatgccttacgaaacagtagtttctattaaattatatttagattcacaatacatggtccagatcatatcggaatgtgccttcataataccgaatctaataaaatttctttattaaagaatatttatatttacaacgacgcaataaagatgtatattgtatccgatagatattttcagagccttcattagacttttctgtatcatagagatgtattatataatacgtagtttcatagcatgttttatattataatgttttatggttcctcatctagaaagcgcactaaataaaatgtttcccgt

SEQ ID NO: 392 - DNA, 377 bp, Spodoptera frugiperda
  misc_feature (1)..(377): Gene targeted: Vrp1; Universal ID: GS871
gtcggggcactctcagcggcattatcagaagctttagcaggacgagatagagaacctagagaagttcacagagaggtcccaagagagccccctgcgagacccgctgttcggagacaaccgagcgacataaggacgagaggacccccgcctcaaccgcctatacaaaaaccggctatgccattgagttcatcagactccgtgctaacaacgaactcggtgctggaccgcatcagcagtctccaacagcagaactccgaacaagtgatcacttctcatgtcgcctccacgctgcacaggaacaagagctcgctgcatgcgaccggacagggagcgctgggtggtagcatgacctccctgtcatcgtcatcatcgccgac

SEQ ID NO: 393 - DNA, 488 bp, Spodoptera frugiperda
  misc_feature (1)..(488): Gene targeted: dre4-CG1828; Universal ID: GS882
gctggtttggaattagcgaaaaaagaaaaacctgacttagtggagaatcttaccaagtcctttgggtttgcaatgggcatagaatttcgtgaaagttcaataattatagggcccaaaacgaacacagtggctaagaaaggaatggtgtttaacattaacattggattggcgaacttaacaaatagtgcttcaacggaaaaggaaggcaagacatacgccctattcattggtgacacagtattagtgaacgaagaacagccagcatctctcctgacacagtccaaaaagaaaatcaagaatgtcggtatcttcttaaaggacgacgatgaggaggaagaagaagaaaaggagaacaagactgaaatacttgagaacggaggtagaggtaaaagaacagctgttatcgaatcaaaactgcgtacggaacattcttctgaggagaaacgtaaggaacatcaaagggaactggccattactcttaatgaaaa

SEQ ID NO: 394 - DNA, 488 bp, Spodoptera frugiperda
  misc_feature (1)..(488): Gene targeted: Dhx15; Universal ID: GS881
ttgggccagcaagttggttacagcatccgttttgaggactgctccgggccacagaccatactgaagtacatgacagacggtatgttgctgagggaagccatgtcggaccccatgctggaacaatacagagtgatcctcctcgatgaggctcacgagaggacgctggccacggatattctaatgggtgtcctaaaagaagttataaaacagagagccgatctcaaattagtcattatgtccgccacactagacgccggcaagttccagcagtacttcgacaatgcgccgctaatgaatgtccccggcagaacacatcctgtagagatattctacacgccacagcccgagagggattacttagaagccgctatccgcactgtcatacaaattcacatttgcgaagaaatcgccggagacattctactatttttaactggtcaggaggaaattgaggacgcttgtaagaggattaagagggaaattgataa

SEQ ID NO: 395 - DNA, 488 bp, Spodoptera frugiperda
  misc_feature (1)..(488): Gene targeted: CG40470 (nearest homolog); Universal ID: GS874
tgccgccggataaggtacccatccacataatcaaaacgcgtagtatagacctgaacaatgcccatggcctatcgatggaaactcgactggacaaggtggtcgtaccaacaggctacaagctggacctagagccttatttagaagatggtcttttcaaaggtcatgtcgccattaacgtgacctggttgatggacggtaacgagatcattttacattgcgcacatgaaattgagctcttggagtctgaagttagagctgatttttctggagacgctaaggaacagaagagggtgtctataactaagatgtcgatggactcgaagaagcccatcgtcactctatctctagagaggacagtcccgaaaggtgccacaggagtcctgaagtttagcttcaagggtaatctggaaacttcttcgactgaagcgttcttcaaaacaacatatgtgactgatcaggaagtagaaaggattatagcagctactcaa

SEQ ID NO: 396 - DNA, 420 bp, Spodoptera frugiperda
  misc_feature (1)..(420): Gene targeted: Rpl40; Universal ID: GS932
ggaggcttccgacaccatcgaaaatgtcaaagccaagatccaggacaaggagggtatccccccggaccagcagcgactgatcttcgctggtaaacagctggaggatggtcgtaccctgtctgactacaacatccagaaggaatctacccttcacttggtgttgaggcttaggggaggtattattgagccttctctccgcatcttggcccagaagtacaactgcgacaagatgatctgccgcaagtgctacgctcgcctccacccccgtgccaccaactgccgcaagaccaagtgtggacacaccaacaacctccgccccaagaagaagctgaagtagatgaatacatactttcaacattttattcctaagacttaccaatgtcgtaaaaaattgttgtgcaacaactgctctaaattaat

SEQ ID NO: 397 - DNA, 320 bp, Spodoptera frugiperda
  misc_feature (1)..(320): Gene targeted: Rps21; Universal ID: GS942
acgactgcatcgtcaggctcaccaagaaggacggcatattggctaagaactactgaagtaacttcttagtcagtaaggatctaattttaaggacacaataaaaacacttaaaaaattttacttctttttatttgatatattttatagagtaaatataaagctaatatagaaaatatcacgagtcaacaatgtgagcgcttgcagcactcggacgcagcgcgccgtcaccgcggccgccgtcgcttgtagtagttctctgtcgacaacaacacacttgtagaacctaacattatgacaatatgtcttcggaatattccctg

SEQ ID NO: 398 - DNA, 466 bp, Spodoptera frugiperda
  misc_feature (1)..(466): Gene targeted: RpL3; Universal ID: GS943
gcgagtcattgctcacacacagatgaagctgctcaagcagcgtcagaagaaggcacacattatggagatccaactcaatggaggaaccatcgaagacaaagttaaatgggctagggaacacctggaaaagcctatcccaattgactctgtgtttgctcaggatgagatgattgattgcattggtgtcaccaagggtaaaggatacaagggtgtcacttcccgttggcacacaaagaagctgccccgcaagacacacaagggtctgcgtaaagtggcttgtattggagcatggcatccttcaagagtgtccttcactgttgcccgtgctggtcagaagggctaccaccacagaactgaaatgaacaagaagatctaccgtcttggacaaggtatccacaccaaggatggcaaggtcatcaagaacaatgcttcaactgagtatgacctgtctgagaagtccatcacc

SEQ ID NO: 399 - DNA, 488 bp, Spodoptera frugiperda
  misc_feature (1)..(488): Gene targeted: Vps28; Universal ID: GS944
ttagaaaaataaaattcgacattaatttattaaaccttagccttgccttaacaatattgcgatttaagtgaagtgatcgtttatattagagatatcaaaatgcaggacacaagaccagaattatatgaagaagtaaagctttacagaaatgccagggaacgtgaaaagcatgacaacatggcagagttgtacgcagtggtcagtaccctccagcacctagagaaggcgtacatgagggactgtgtgcgtgcgcaggagtacacggcagcgtgcagccgcctgctggtccagtaccgagtcgccttcaaacaagtgcaggctgacgagttccccaatatcgaagcttttgttgctaagtacagattggactgcccggcggctctggagaggataagggagaacaaacccaacctcatcaaggacgacaagggcaacaccaacaaatacatcgctgagattgtctcgctattcataaccctgatggacaa

SEQ ID NO: 400 - DNA, 430 bp, Spodoptera frugiperda
  misc_feature (1)..(430): Gene targeted: Sec23A; Universal ID: GS933
ccagcctctcccgtctgctgaaaattgttataaaattccaataacaaccaatttctgaatgaatactaaataaaacgctagtttattgcatatgtggctggactcgagttgctgcaagcagacttgatcggcgatatggccacgtatgaagagtttattcagcagaatgaagatagagatggaatacggtttacgtggaatgtgtggccctcgagtagaatcgaggctactagactggtggtaccactggcatgtttgtaccagcctctgaaggaaaggccagatttgccaccaattcagtatgaacctgtgttgtgtacaagaaatacatgcagagcaatcttgaatcctatgtgccaggtggactacagagccaaattatggtcctgcaacttctgtttccaaaggaaccctttccctccccaatatt

SEQ ID NO: 401 - DNA, 364 bp, Spodoptera frugiperda
  misc_feature (1)..(364): Gene targeted: Sec6; Universal ID: GS934
actcgcacccctcgctcttcaaacacatcaccttcagcgaccgactgctctcacacttcaacctatagaacatccacctcaactttaccactacatgtattattcatatttatacatcgttttatacacaatatcgcaatgctggtcataaatatcagcccctgacttagtttgaaactagtcgaacagttacatgaataagccgttaaaccaaaattatatttttcatatgtcacaaaagtgtaccttatactgtcatcagcatacaccagtgtttttattatttatttaagaaaatctgtaagaactgtagttagacatatgcacattccgataaatatacaactgtaatacagaatggaaa

SEQ ID NO: 402 - DNA, 488 bp, Spodoptera frugiperda
  misc_feature (1)..(488): Gene targeted: vATPase-Vha26; Universal ID: GS945
cggccgcaaccctaaccgtaaattcaacgattaagcacttagcggtgacctatattcacacttgttactactaacagtttatttaaagttcataatttgtagaactataatattattaatattataataagttttttcttttgcctaataaattatattgtaataatgcgtacaattttatcgctgtttagaatgtaatttgatgagtgtcgccagaaaatgtacaactgacagacaatgtgtgaccctgtgagtttctgattcctggccgccacaccaggccgctcgtactgtgcattagtttcgcctgcttctatgatgtcaacatcttactgagcctagatattttattataacaattcattcatatagcataatgttatatgtatcttagaggatgtagtttataggatttggagatggtttaattaaaatgttaccattattaggaaatgcaaatataaccatacttatatctaaagttgaaa

SEQ ID NO: 403 - DNA, 488 bp, Spodoptera frugiperda
  misc_feature (1)..(488): Gene targeted: Vps16A; Universal ID: GS946
tgattcaagatttactttgcaaataaatattgtattgttttgtgtagtattagtagtattatctgctttcgaaaagaaagtttgaaatgttaataaaactgtgaatagaaatatacgtttaaaatcttgataatttatataaaacaattcaataatgtgttggtagaaaaacaaacaggaaaaaatagcaatcatacaagtctgttatcaacagtgctccctaataaattggagtgtaattaatatttcaaaatgtcggcgttactaactgcagattggttcctattggatacctattacaggaaattcgacctatataacatgaactggtccatggacgatggactggagaacatgatagtcagtggagctcagtacggaggccccatggctgtggtcagggacaggaagcagtttgtgaggatcaccggagctgctaaacctgttataactatctataatggagttggaaatgtgatatcgaagat

SEQ ID NO: 404 - DNA, 473 bp, Spodoptera frugiperda
  misc_feature (1)..(473): Gene targeted: UEV1a; Universal ID: GS935
attttgtacgatttattgcgataacacagtcttacaaaacaaatcagtgatgacaacaaatgcgatactaatggtaactttattgttatagccccaaaatcacaattttgactaagcttgcatgtcaacatataaataatcaggaatgatttcaatacccattattttactactcacaaaagcaacaattttaggtactcaaggcaaattaaaatacttaaaacaaatcctacttaattcttatgtaaatagttagaagtaaaataatgtgcattaaaatatctttgaatagattacatttcataaaacgtaatttataaatatgaaaaaaattgcacaaacttttattcaagtagtgaatgacatcactacagaactgaaactaaacaaaactgcactcagcaccagatgtaaaacactcgacatgttcaacaaaaattaaataatatttatacacatttacaaaatataat

SEQ ID NO: 405 - DNA, 488 bp, Spodoptera frugiperda
  misc_feature (1)..(488): Gene targeted: relish; Universal ID: GS936
agcttgcgacttggtcatcaaattgaaagcgttacactatgaatacaagtcgactgatgcttgtactcagtctattctcccccacccctaatgccaaaaatttactacattttacaggttttcgacgtatttacatgatttctttttatatttttgtatttaactaatttgttaaccatttacgctgcgattaattttgcagccactttaaatgaatgcaaactttcataagtacaatgttaatattgtgtctgctgttatatttatcaatgtatgtgtaataatgttacccacttaatgttctagagatgaatattaagaagcggaagatggtaaacgactcgttacgaaacttcgatattgaaagtaagttcgggtttataaagttacgtattatttacacgtgtcggtacagggtgtctgacattaacatttatttcaaatctacattcatcattagttagccaatggtttattattattattat

SEQ ID NO: 406 - DNA, 371 bp, Spodoptera frugiperda
  misc_feature (1)..(371): Gene targeted: diptericin; Universal ID: GS979
ctatactggtgggaggcctcattggatgcttcttggataatgttatacctggtacggatgaggagcgaggattagcagcttgggccaaggagatgagtttggatgcagctggagcatctgaagagggagacacatatgacttccctataggaatgggactgatacggaggtggaaatggacccagtatctaccattcatgcccacgtatcaggctggcaagttcactgcgttgttcacgaagaaagagaactaatgaccagggttccataactttagtggtggttcttgtaatgtggaagtcgatcttattgcttatgtgataaggttggacttggcatacgattgaagtgagttctttcttttattgaat

SEQ ID NO: 407 - DNA, 486 bp, Spodoptera frugiperda
  misc_feature (1)..(486): Gene targeted: spirit; Universal ID: GS973
cgtgtgtatggtgtactgagtaacacatctatagtgtttgtcgaatattgtagtgcttacaaatcatgagtgtcataaaaactcctaaattattatgttgtcttgtgttaatattacatgtgacgattggacaagatgtgttgggtgatactgagccactaaaggatcaagaagaaagcatacgagtgggggctttaccaccagtattagcgggcagtatgagtcagccctacaatatcactgatgatccgtgtgcgccgtataatccacctgtaccagacttcaggggccctggtagaagggttagtgacgtgaaatgttacgagtacatctggcatgtaaaattacgggatataaaagaaaaaagggctaaaagatgtagtgaaatacatccagtccccggtattataggagggcgcatagcaaaacgtggagaattcccaaatatggctgccataggatggaagctatttgtcggaacatgga

SEQ ID NO: 408 - DNA, 487 bp, Spodoptera frugiperda
  misc_feature (1)..(487): Gene targeted: sphynx; Universal ID: GS981
ttaccatcaggatcgcttctacatatggactatacaaacgaaacggttatcgctgctggctatggaagatactctgatgtgacgaaccctacgactaacacgatggcgcgatatgttgcgctggaagtgatagaactacaaaaatgtcgctcgttctacggtaacttggtgctagattccaacatttgtacaaacggctatggaggagttggtatttgccagggagactcagggggacctttgacaatgaatgttaatggacagccagtgttgatcggcgtgagttcatttgtggcacgtgacggatgtgaattacagttcccttctgccttcgcacgagtcagcagttatatcaactggatacgcgtacaaatataaattaacacaagtaataaatattaattccaggacccgctttaaaaaaatgttttcccatagcaatataaaaagatgcacatacgctaaacttaacgtccgccagcatatt

SEQ ID NO: 409 - DNA, 468 bp, Spodoptera frugiperda
  misc_feature (1)..(468): Gene targeted: grass; Universal ID: GS976
atatccgcagttgatgtacgatggtttatacaaaactgaatgaatactccaaaagatatggactgaccccaataatgtgttttatggggacattactatataccagaaagaaatggaatagtatatgtaaggtacatttttgaatcagatctgtttgtatacgggtactatttctggtattcataagagagaattggtttcaaacatattgaaagacatttacaaaattaaaatgagtttttgactggttatagtatagttaagtgttagtgccatccaagatttgttttccaattgttgaggaggaaccatatatagatttgtaaaacactttcttatacataattaaaccgaaattgtactaaagtctatttgaaaatgtattttttctactctcacacaatctataggcacatttttggaattgagataactaataagctctcattgaactactgaattttcttt

SEQ ID NO: 410 - DNA, 486 bp, Spodoptera frugiperda
  misc_feature (1)..(486): Gene targeted: pelle; Universal ID: GS974
tttgcatagtggtcgtgttgaacattatttttatactgattacgtagttttgtgatataaaaaatgtatatttacgagttaccgtttgagataaacaaggagttgtgtcgtttgctcgactcagaaaactattggaaggaattggctggaaactggatgaaatatactgcctttgacgtaaacgacatagaacaaacatcaatacgcttgggagtatcaccaacaaatcatttgctgtcacgatggggccagctgaaccatagagtagatgaactttttattttgctgtacaaaatgaagcacatgccagcgctgaactgcctaaagcctgtagtgaatactgacttccacaaattgttaaataaacacagacatttgagcagttctagggataagaaaactgctcttgttactgagcatacaaacaagaagaattcaataaggactgatggatccataccgctgcctgttatgttaatagaaaat

SEQ ID NO: 411 - DNA, 485 bp, Spodoptera frugiperda
  misc_feature (1)..(485): Gene targeted: DIF; Universal ID: GS977
tttgtatgtacccgtggtctaacagaaagtgtttgtttttatataataccagaaagtaatagacgcaacaatacttttcattgtattcttaaacatttattacgtgatcagacattgatttgtaaatattttaaaataattacgtttaatgcaactccgtatatggaatgttatattctgtctatataatagcatccaataccgtttctacgtgctagaaacgactatctggatacatcttacgacatggacatgcgaatcaaagtaaagttgaagcatgtcatatgaaataattgtttagtggctaatgactccaacgctgtggatttatcatcttgttacatttatttcacttctacataacattttcttaaataattttcctgaaatataaaaattaaacaatattctttgatattttcacaatgactttagtgtaatcaatcccttcgggaaaagtgggatacaatctatatttaaatatt

SEQ ID NO: 412 - DNA, 488 bp, Spodoptera frugiperda
  misc_feature (1)..(488): Gene targeted: Effete; Universal ID: GS980
caagccacaattatgggtccagtcgacagtccttatcaaggaggagtattctttctgaccatacatttcccaacagactacccattcaaaccaccaaaagttgcattcacaacacgtatttaccatcccaacataaacagtaatggttccatttgtcttgatattctgcgctcacagtggtctccagcactcaccatatccaaagtgttgctttcaatctgctcactcctatgcgatccaaacccagatgacccgttggtgccagaaattgctaggatctacaaaacggacagagaaaagtacaatgaactagcccgtgagtggacgaggaaatatgccatgtgatgagtcaattgtgacgtcagcaaacatacacacacatcgccacagcccgggctctaatcccattccctatcccttaatcctgctccccaatcctttgttatccccatcaaacctaaattaactggagattgtaaaaatgttca

SEQ ID NO: 413 - DNA, 478 bp, Spodoptera frugiperda
  misc_feature (1)..(478): Gene targeted: spheroide; Universal ID: GS968
ttctgcagcccattgtgttcataaagcaaaccctcgttttatgaaaatagtagcaggcactaacaatttagatgttgggggtaaaagatgcgacgtttctagaataatcgtgcaccgacgatacaattccactagcagacaacacgatattgcacttctcaaaacgaaaagtccatttgattttgaaattatcaagcctttgagattaagtaaacgggaacttcatgaaggcgatgagattgttctggttggatttggtgctagtgagccacacggatcttcgagtcgcattatgtacactttagaaatgccagtttttaatcaagaaatatgtgaatatgctatgagatattcgagaccggtcaccaaagaaatgttttgtacattcacgcagatcggtcagggaacatgccatggagattctggcagtccattagtgataggtaatgagctcgttggcatagtgtcttggggaatt

SEQ ID NO: 414 - DNA, 451 bp, Spodoptera frugiperda
  misc_feature (1)..(451): Gene targeted: Toll; Universal ID: GS975
ccacatgacgctctgatcggacttacgttacagtgaaaacacgcttatcacttacgatacaaaattttgttacggactttattgtacaaaaaccagttaaatagtattcagaaaatcattttgaatgctactacagtgaatataggacgtttcgtaaatactgatgtggacagtttctgtgaaattttgtttacgtttcgaagaacgctaaaacactggattgtgaattgatattgacgcatcatgagcattatctcaacaaggactatttgttaaattgaagccgaaatagtgttcataaattgatggatactacacatccggcaaggggacgcaatacgcgaacgccgacggaaaaaacatgacactgagactatcgtgtcttgttttctttcttccctgatatttgattttccccatcatggctcaacaacaaacttttttaagaaat

SEQ ID NO: 415 - DNA, 488 bp, Spodoptera frugiperda
  misc_feature (1)..(488): Gene targeted: Tab2; Universal ID: GS966
ccaagatgtaggtagcttttagttttagagtactaatttacaaaaaattgtcaaggcagcacctaaagtactaagcagacctatgcgtatgtacctaaaacagcattacaaatgcgataacgcaacttcagacgtgtgacgaaatctttccgacagctgtttgctatcagaaacgagcctttaaaacccctccttgtccaatcaaatggtttttactgtattcgaaatgtgtagatgtatttttaaaacatttttctaggtaactagaacgacaatgtattacctaattgtcttgtcttatcacacgaaataaatcagccaatataatacatagtaacataaacataagctatctttttcaaagatatcgccagtttagataaaatttgttaccggaaaccgccaaatattttcgtagtacaatcgaacgaattgattgtgactaggtacaataataccaattaccaggtgatgttgatacaatagta

SEQ ID NO: 416 - DNA, 488 bp, Spodoptera frugiperda
  misc_feature (1)..(488): Gene targeted: caudal; Universal ID: GS971
ttgtacataccattgtttcgtaattgataacgataggtgatgtttatatattttgattgagttgaataattttacattcattgcgaatctcatgacttcacgtatgcagtgaaatgtgctaatgtatggcatgaaatcgattatttatcttcgcatttgtggccttgagaagtaggtgcaacatttttatgttcaatgagattattgctagtattaaatgttctgtaaataatagcttacatttagaataatttattcttattccaatttctatagcatacacaatgaagaattatcactgaattcacaaatgaattgtttgggagaaaacgttaacatagtaataatatattggaacggttacatttttagtatacgtacataatatgttctggataactattatgttagagaaatgagttgatttgaaaatgatatcggaattatatacctgtatatcatcgtaatagaatgcccagtgagaaaat

SEQ ID NO: 417 - DNA, 488 bp, Spodoptera frugiperda
  misc_feature (1)..(488): Gene targeted: methonine-rich storage protein (hexamerin homolog); Universal ID: GS970
attttctgtgtgttatgtgtaacaaagaatatttaaacaactttagttggtagtagagacattccttctaccatacattcgagaatgctttttactaacacaggcaaatcctaagataatatatcctcttgtatattatttgatactgcattataatattgtatatgtattcattcaactgtcttattatttatatattgtttggctgttactggtacgacctggcattgacaaaggattccgattgtagctgtaggtaattatctaagagtagttgtaagtaaacgggtctgtaaatatactaagtagttgttagttctattgtacatattgtgtaaatacttggattcttgagactgaataaattagccttttaccaaatgtttagttttattcacaactaaccgttgaacattatcgttcaaacatcatattttttatggtataagcgggtaaacgagcctacgtatcacctgatggtaaccaat

SEQ ID NO: 418 - DNA, 463 bp, Spodoptera frugiperda
  misc_feature (1)..(463): Gene targeted: Insulin receptor 1; Universal ID: GS978
ttgcacaccgagtacttactagtgccagttaagtgacaacgttgaatttaaatgactatataccgcaacatttgtttaacaacatgttattgtgtacgtgaatataaatgtaggtcgtaatcatgttacagttattctcaaatacaagttacgccgataacaatgtgttccccatcgacgacttaaatgcaatagacaatacctgccactattgttaaatagttatattactagactgcatactattattgtttaactacgagtaaatgttatgtccccaaagtatgagtgcaactgacagagtgcctatatttacagtggttcatcgcttgtatttaatgggttgcaggactttgatactatctcaaaactaaacatgatcgagacgattataagtgatcttactagtaagtaagcaccgataatgtacatccttatcagtataaaagttgtttttttaaga

SEQ ID NO: 419 - DNA, 473 bp, Spodoptera frugiperda
  misc_feature (1)..(473): Gene targeted: Sh - Shaker; Universal ID: GS965
ctggagaccctcccagagttcaaacactacaaggtctttaacacaaccaccaacggcactaagatcgaagaagatgaagtccctgacatcactgacccattcttcttgatagagacactctgtatcatatggtttacgttcgagttgatagtacggtttctggcgtgtcccaacaagtttaacttctttagagatgtcatgaacataatagacatcatcgccattatcccgtacttcatcaccttagcgacagtcgtagcagaggaagaagatactctaaacctaccgcgcgccccggtgtccccgcaagacaagtcgactaaccaagcgatgagtctggccatactgcgggtgatacgtctggtgcgggtgttccgtatcttcaaactgtctcgacactccaaaggattacagattctgggtcgtacgttaaaggcgtcgatgagggaactgggcttattaatattcttctt

SEQ ID NO: 420 - DNA, 474 bp, Spodoptera frugiperda
  misc_feature (1)..(474): Gene targeted: SK - small conductance calcium-activated potassium channel; Universal ID: GS967
ttagtgaccgttgcttcgagaaaattagagttaactagagcggagaaacatgtccataacttcatgatggaaacccagctaacaaaaaaggtaaggtgactgttactcgactaacagtcgaaggacacgatgaaggtaagacttataagctaggttatgctaatgatgattaagataatttaaatgataataataaaaatctgcttaaaattaatgcttgacacaatgagtaacacacactagatgaagttaatggaattgccagaatacacaatagtgatgacactttgctagaaactaaataaaagaaacatgataaaattattaataatgttcaaaacagttttaaggtaaatagcttcgttcacaataagcttaagaaacattggacaccatgtgatgtcatgtgttaaaggtggataaaagacatactaattatctgattgaattcatggatacttacagctgaaaaat

SEQ ID NO: 421 - DNA, 487 bp, Spodoptera frugiperda
  misc_feature (1)..(487): Gene targeted: chitinase1; Universal ID: GS982
catcacaagcatctcgcagcaagttcatcgaaaagttgattccattcttgcgcatgcacaactttaaggggcttcatttggattggaactaccctgtttgttggcaaagcaattgtaaaaagggagccgtttctgataaacctaatttcgcaaaattcgttcaggaactatccaaagcattgcatggagctggtatggagcttggtgtcgccatttctggttataaagaagtgatcgagtccgcgtatgatttaccagttctatcgaaagcagccgatttccttagcaccatgacttatgattaccacggaggttgggagaaggctaccggacaccacactccgctagttcctccttctaaagaagctctagcgcattattctgttgaatatgctgttaaagctttgatcagcggaggagcagatcctaagaaacttcttctcggattatcattttacggtcaatcgtatagactcaatgatatgaa

SEQ ID NO: 422 - DNA, 286 bp, Spodoptera frugiperda
  misc_feature (1)..(286): Gene targeted: ATPase; Universal ID: GS972
cccgacgagtctgccctggtttcagcagcaagaaattttggtttcgtgttcagagaacgctcgcctaatagtattacaatagaagtaatgggtaaaacagaggtgtatgaattgttatgtatattagattttaataatgttaggaaaagaatgtccgtgatattgaggaaggatggtgaaattaggttatatacaaaaggtgctgataatgtaatatatgacagattaaaaaatggaaatcaaacagatgtaaagtcaaagacacaggaacatttaaataaattcg

SEQ ID NO: 423 - DNA, 452 bp, Spodoptera frugiperda
  misc_feature (1)..(452): Gene targeted: Vacuolar ATPase A; Universal ID: GS969
gttagctagcggcgtcttgtacaaaaatcatgcgctataataacgtatagttacttgctgtttgaacctctgtgaagttacgtgttgaggagacgaaagttataaataaatacaataaagtgtatatattggtgtttcatttccctgttatacgagctaacgataattccttgtagttgcacgctactgggctgtaaatgaaccatcggcctgtgcatcggcatcggtgttattacaatctttgcttacattttctcaaagggggtaaggggataaataaaattacagtgtttactaggatctcgattctggcgtacacaggcctgggccatgtctaatgaatatattttctcgaaattcagttattagaagtaggagtggcttgtcacatcataattcgtacggatcgtaggtaattttttaaataaattatgtatgaatatgaaaaataa

SEQ ID NO: 424 - DNA, 263 bp, Spodoptera frugiperda
  misc_feature (1)..(263): Gene targeted: methionine_rich_storage_protein; Universal ID: GS1046
actgaacacttacctgtactacttgcacatgagctacccgtactggatgacgcacgacatgtacaccgtgaacaaggagcgccgcggggagatcatgagctacgccaccatgcagctgctggccagattcaggctggagcgtctctcacacgagatgtgcgacatcaagcccatcatgtggaacgagcctctcaagaccggctactggcccaagattcgcttgcacactggagacgagatgcccgtgcgcagcaacaacatga

SEQ ID NO: 425 - DNA, 488 bp, Spodoptera frugiperda
  misc_feature (1)..(488): Gene targeted: SK_gene; Universal ID: GS1026
acaagggcggggggacagctaagcacaaacccaatataggatataggttaggtagaagaaaggcgttattcgaaaaaaggaaacgaataagtgactacgctttagtaatgggaatgtttggtattataattatggttatagaaaatgaactttcaagtgctggtgtatatactaaggcgtcaatatattcgcaggcgttgaagacgcttatatcaatgtcgactgtgattttacttggcctaatcgtcgcgtaccacgctttagaagtccagttatttatgatagacaactgcgctgacgactggcggatagcaatgacgtggcagcggatagctcaaattggcctcgagcttgctatctgtgccgttcatcctatccccggtcaatatacctttacctggaccacaaaacttgcaaacaaaggcggagttataggcgttgaagtagtaagtaccagtaataaacttcatattaatagttttaagtat

SEQ ID NO: 426 - DNA, 486 bp, Spodoptera frugiperda
  misc_feature (1)..(486): Gene targeted: troponin; Universal ID: GS1048
gaacatcgaggacgccaacgaagcaatgctcaagagaataatacaggagtatcatgaccgcgtgtatgtgtgtgagggccagaagtgggatttggaacatgaagtcaggaaaagagattttgagatcgtagacctgaacaaccaagtcaacgacctcagaggcaaattcgttaaacccaccctcaagaaggtttccaaatacgagaacaaattcgccaagctccagaagaaggcggccgagttcaacttccgcaaccaactcaaggttgtcaagaagaaggagttcaccctggaagaggaagacaaagagaaaaaaccagactggtccaagggcaaacccggcgatcagaaggtaaaagaggaggaggttgaggcatgaagtagtcctagctccctaaaccatacgtgaccttcgtgtacagactattattgccatacacggaacattcatgtgataccccatcctgtaattggctagattcaata

SEQ ID NO: 427 - DNA, 480 bp, Spodoptera frugiperda
  misc_feature (1)..(480): Gene targeted: P102; Universal ID: GS1045
ttacaaggggcatgttagtgagttatacaaggtactacgtcacaacattatctactaaacggcaaggaacaacaataacgttttcaacgcataaatataaatgtctaaatgaaaccacttatttaactaaataacatatgtagtatagttatatacagcacattagaatgccattgtagaaaactgattaacataaacatatgttgtaaaaatactacatattataattatatttaactgcaatcacgttaatcactcaagtgaataaatagcttttaaaatgcttaataaaaataagattcttagtagagataataaaatgtactgaactctgacctcctttgattacagtccacgagcacaacaaatgcttcgcgtctatcataatataatcgtagttaacaaacaataaacatagtatacagaaaagtacaaactttaaacagatcaagatgtaaatgaacccgtaataccatatta

SEQ ID NO: 428 - DNA, 488 bp, Spodoptera frugiperda
  misc_feature (1)..(488): Gene targeted: vATPase; Universal ID: GS1036
catgaacatttccattaattaatctagtataagctaagcttgtgtgtgataacaccagtgttgggtgtaagcaattgtttgtccaggatcatctcaaaactccagaacacacgaacaaatttacacagttttgcattcattgaaaaggtctctggctccgggaggcaaagcaaagaaaattctggaaaaaatcaagagaaaagcaggaatagcagggaagattgttggtagtgaaacggagttatatgtttgagttagtgtgtgcaaatattggcagaatcaagtgcaattttcttattgtgatgtagttatttaatttctatgtctgtgctgaatggtttgcttttaattatggactaaagttattaagtactccacagataacgctggtggtataactggagtgtttcacttaattagaattttattattaaatcaattaccatttgaggacacctacaatgtaatccttgtctatattttaataa

SEQ ID NO: 429 - DNA, 488 bp, Spodoptera frugiperda
  misc_feature (1)..(488): Gene targeted: chitinase; Universal ID: GS1044
tgggccgagggcggatccaaatactcccacatggtcgcacagaaacaaacgcgaatggccttcgtcaggagcgttgttgatttcttgaagaaatacgactttgatggtttggacttggattgggagtaccctggtgctgctgaccgtggtggttccttctccgacaaggatcggttcctcttcctcgtccaggagctcaggagagcattcatcagggagaagagaggctgggaactgaccgctgctgtgccactcgccaactttaggctgatggaaggttaccacgtacctgatctttgccaggagctggatgctatacatgtgatgtcgtacgacctgagaggaaactgggctggatttgctgatgtgcactcgcctttgtataagcgtcctcatgaccagtgggcttatgagaaactgaatgttaacgatggtttagctctctgggaagaaaagggctgtcccagtaacaagttggtggtcggtat

SEQ ID NO: 430 - DNA, 488 bp, Plutella xylostella
  misc_feature (1)..(488): Gene targeted: sd; Universal ID: GS907
ggcaagacggaaatctttccaactattcaatagtatcggaggatatctttttcaagttaccaatgattaagcgcgccctgagagcagccacaagcgagataaagatcacagctagcacctggtcaccgccagtttggatgaaaacaaacgaaaggatcacaggctatggacaactgaagccagaattttaccaggcctacgcggattatcacttattattcctggaagaatactcaaaggccgaggtacctatttgggccatcactactactaacgagcccataaatggtgtagctggtgcaccttttgtaagattcaactctctgggatggttcccaagccagttggcccgctgggtgtataataatcttggacctaccatacgccagtcccgatttaacgccacaaaaatcctggccattgacgatcaaagatacatgttacctgtttatatttatgggatggagcaagaagaaccaaaggctttt

SEQ ID NO: 431 - DNA, 488 bp, Plutella xylostella
  misc_feature (1)..(488): Gene targeted: Rpb7; Universal ID: GS910
gtcagccgggagattcaacaaaagaagaaatcaaagttgaggacgtcttctctggatcgacaaatgagactgcagtggaagaagtggatgaagaggcattcgctaaagccgtaataacgaaagaagtagatctgacaaaggatgaaatcactaaagttgactacagcggggcccaagtctggaagatacaaacaaacaaacgaagcgtagtggctgttgtaggcagattgagacgaagaaacctcgtgtcaacatggggcggaaatcatacgcacatggatatacttgttaaacctaacgcggtcaaaaatgttacaagagctttcaagcgggagaacatcacatacgatgtcctaattgaagatttacagagacgaatcgatgaagaaaacccgccattggatgagaatgaattgtcccttcaagacagacgaggtcataaaatgacgtggaagcaataccacaggctggaagacattcatcaattc

SEQ ID NO: 432 - DNA, 488 bp, Plutella xylostella
  misc_feature (1)..(488): Gene targeted: calypso; Universal ID: GS914
gatctctggagctgaatcagaaaagagtgaaggaagcattatccaaaataagcaaacattttagacatattcattcaaagggaattcaatacaatgagcaaggtgaattgatatccacgcatggagaggagtcaatgattgaggatatagatgagcagatcagtgaagacaccatcatctcggcgctggaagcctcggaggtgcacacatttgaagtggacttcactgtaccaatggctatcgagattggcaccacggatcaggagcaacaagatagtcgaattgttcttgtgagtccagtcgatcaaggagctacagtaaaatttgtcacaatagacagagacagccaaatactcgaaaacatctacccaacttcaacaacagctctgataagaagcaatgattctcctattctagtctacagagaaataactgaggatcagcctatgaaactttcaaagctgtttttcactcaggcagaactaaac

SEQ ID NO: 433 - DNA, 486 bp, Plutella xylostella
  misc_feature (1)..(486): Gene targeted: Rbm24; Universal ID: GS913
tcgccgccctaccagtacgcatcgttatcgacactctatgttttctttattttatgtttaatgccgtgttcgtgtaagattttgttgatttgagttttgttggtggtggatttcgtttaatacacttatattatttataagagagttgtgatgttgggcctcggcgcgggggcggtcgagcgcgcgcggtgtgtgcgtagagtggcgcgcgctcgaccccgccggcccacagcttaaacattgacagctccactgtgccccgacaaactcccaccgacagtcatagccggttcacatccttgtggccatcccgtgggtgttgatatttaagctgtgtctgcactgagacgtggcccgcgagcccgcgccgcccgcccgccccacacacatcagtataattactcacattgggcgacaaccaaatcaattattcatcttaatcttcattctttacagacaaatggccatgtaaaagcttatccatta

SEQ ID NO: 434 - DNA, 345 bp, Plutella xylostella
  misc_feature (1)..(345): Gene targeted: twisted bristles roughened eye; Universal ID: GS909
aaatgtatagagctctgcggagagttactcacctggtttttagaaatttgtcatgtttgccatcgatgacattgcaacgcatccctgacgtggttcctcggcgagtgtctgaatttttgagacgggatcgaaaataaatcaaaccaccaacaagccaaccataaaacccaatatttaactataccccataaaatagactaaccaaataattatacaagatgttggacagcttgtttgacgatgtgaaacgcatgaacaagcggcagtttatctaccaagtgttgagctttggtatgatagtgtcctctgcgctgatgatatggaagggtctaatggttgtgactg

SEQ ID NO: 435 - DNA, 466 bp, Plutella xylostella
  misc_feature (1)..(466): Gene targeted: surfeit 4; Universal ID: GS912
ctcgtgcccacctacaagccgttgagggacttcttgaagtatgacttcttccagacgttatcagtgatcggcggtctgctgatgatcgtgtctctgggtccgggcggcgtcagcatggacgagcacaagaagaagtggtaatcagacgaggataggctacgaggggcgcggtggctcgcgcagacgcctggagtgtatcgggaagtcattttgacgaacgaacgcagtgattgacattgaaatcaatccgttcgtttgttcgtcaaattgttttcgcggtagactagctgtacagtcaacacttgggagacaggcagcggaattaataattgctcaaatatgttgtgaaggtttacccttttttataagcaatcgatttatggaatacttttacacgtgtcatgttgtaagggtaagattctgactgtcgttttcaagtgtgaaataatcatggaatggagaagga

SEQ ID NO: 436 - DNA, 401 bp, Plutella xylostella
  misc_feature (1)..(401): Gene targeted: Rpn7; Universal ID: GS915
ccagagctaaaggacgaccctcaactaaaagaacagctattcaaaggcatcaaggatgggaacatggcaccttactacaaggaggtttgcactgatcttgggtggcaatttgaccaaagattgtttgatgaaatggctaacgaaaaccaggacagattatccaaattcaaagaagatgactcagaaacaccagtgtggcaggacagacttgactacctgtgttctattggcgacaaggaagcagcaactgccctagctacgtctaaatacgaggataccaccctgaccaccaacaggaggctggacgccatgtttgcattgttcaggatcgcctacttccatggatgtaatgtgaaggaaatgggaaaatgtgtcacaaaagcacatgagctggttgacaa

SEQ ID NO: 437 - DNA, 478 bp, Plutella xylostella
  misc_feature (1)..(478): Gene targeted: how; Universal ID: GS911
tcgcccacaacttcacttcgataaacttcgtcatttagtggtgatcgaaacatcgatgtgtgtggaagtgaggtgtaacttttctaacatttctcacaaaatttacaataaccagtaaccaaaagtaatatttcttattcgaacgtgttggcataaactttttcacgtgacacgagttttagaaacattagtcaaaatgtgtgatactaataatccttcgacacaaagtatagcggactacttagctcagttgctcaaagacaggaagcaactggccgcgttcccgaatgttttcatgcacatggagcgactgctggatgaagaaatagcaaaagtgcgagcgagtttattccaaataaatggcgtcaaaaaagaaccgctggtgttaccagaagcagaaggcatggtcaccacactcacagaaaaagtctacgtacctgtaaaagagcatccagatttcaacttcgtgggaagaatt

SEQ ID NO: 438 - DNA, 477 bp, Plutella xylostella
  misc_feature (1)..(477): Gene targeted: Phenylalanyl-tRNA synthetase beta subunit; Universal ID: GS916
atcaagcagctggtcaacctacaatcactacttttgttcgggaacaagatacaagaattcaatgaaaacataacctctctacccaagttgaaggtgctagatttgtccaggaatcagctgaaaagtgttccggagagcctgaacaaaatgaaggagttgaccagcataaatttaagctcgaatgagattgaaagcatgccaaagtttgttgattttcctaatctaatcatagttgatatatcaaacaataaattatcaagcttcctggatttagaaggtgctgtgttccctcacctaacagacttgaagctcaaagggaatgtgatagagtctctgcccggctgtgtggccagcagtctgccgtcactcaagaactttgatatcggagacaaccagttgaagactgttcctggagaacttgcagctatgtccaaattaaaagaactcaacctaaaaggcaacaaattggccgacaag

SEQ ID NO: 439 - DNA, 488 bp, Plutella xylostella
  misc_feature (1)..(488): Gene targeted: twi; Universal ID: GS908
tgcaattggctacgcagtacatagagtttttgtaccagatactgtcgaatagcgagacgtccagcaatgatggcagtgaggcgagcagcgaccacggcaagtacctcgctcaggacaagctgagctatgcattctctgtgtggagaatggagggagagtggaccaacggacagacgtgagcttccaaaccaaaatataggtttaatacttggtgaatccagttgaagacgcttagctattccatttccgattgttgattattttgtaaagacactacaaacatgacaatgttgtttaaattgtgataggtagttttaagggtaaaagttaatgccaaatgtttattgtaagtgtaaataattttaatcaagtgatatgtatagaatagacactcgctgagaccaaagtagtaacttgttatttaaatgccaatgtttaaatgaattacaattgtaagtacttaataactgatcttcttttgatatttt

SEQ ID NO: 440 - DNA, 394 bp, Plutella xylostella
  misc_feature (1)..(394): Gene targeted: mbc; Universal ID: GS983
gcggccagtggctcggctcgaagaaccgaagcagctttagtggacaaattggactctctggtagctgacaataaggccgacgatcattatcggaggctttttgatactgtgctaatggagcgagtatccacggagggctggcgcgaagccggtgccgcgtttgtgggctgcgtcactcgactactggagagattgctggactaccgagccgtgatgcagggagcagagcacagggacaagaggatggctgctacggttaacttgttgagtttctacaaaaacgagatagatcgcaaggagatgtacctgcgctacgtttacaagcttcacgatctccacatcgcgtccgacaactttgtggaagctggctgcacgctgttgctatacgccgaga

SEQ ID NO: 441 - DNA, 488 bp, Plutella xylostella
  misc_feature (1)..(488): Gene targeted: psc - posterior sex combs; Universal ID: GS899
gcaaaaagcagttttggtacagttaagccactttccatcaaattgagcagagatagtattaagttagcatctgataagagtaataaagagactccatcaattaactctacaaacaacaccccaaagaatgatgagtccttgaaacgaaagcaacatacacctcctacttctcctgaagtaaagaaagttaaaattgatatggataaaatcaaaacacctactccagtatctcaaagccagattccagttcagggtggatctacaacaaaaacacaaatgcccaagaagtcagaagtacaagagaagaaaaaagatgtaacatctccaagattggtacaaccagttgtgccaccaaatctaacaccagcaccaactccttctaaagaagttaaacaaagtctctcaatgccaaatcaaaatacatcagaaatgactccaataaaaaaacccacaccaacacctcaccacatgtcttcaccgaaacaaaa

SEQ ID NO: 442 - DNA, 446 bp, Plutella xylostella
  misc_feature (1)..(446): Gene targeted: Upf1; Universal ID: GS900
ccatgtgtggtaacatggcgaattttcgtcatctttccttgcaagtcgtttgttaattattgcgtggctgttatgggaattttcttggacagtgcaaaatttctattttttgatatattttcattcgtttgctcactataatttcaactctttagaatgagcgtcgacgcttacggaccgagctcccaaaccctcacgtttcttgatactgaagaagctgatcttatcggagctgatacccagggctcggagtttgagtttaccgacttcacgctcccgtcccagagccaaacacaggcctcgcagcacgaccatggcctgtcgactatcaaccaggtgaacggggtggggcgtctggacctgacggcgaagttgtcgagcaccaccaatgccatagcggagcttcagttcgaggaggaagatgaggctctgtacagcaacaagga

SEQ ID NO: 443 - DNA, 400 bp, Plutella xylostella
  misc_feature (1)..(400): Gene targeted: sr; Universal ID: GS894
acgcatacaggtgaaaagccatacacatgcgatgtgtgcaatagacaatttagggagtcggggcagttgaaaaagcatacccaagtgcacacgggagaaaaagtgacatgtaagatttgtaacaagcaaatatcaagagatctaactaaacacatgcgggtacattcgggtgagagaccgtacagttgtaatatgtgcgataaacagtttgcggtgagtggcaatttaaggacccatatgagaacgcatactggggagaagccgtatgtatgtgaattgtgcaataaaccgtttagtcagagcggtacgctcaaaagacatagatgcacagttttggagaaagtgggagatgataatgtgtagtgacagaacatactgggctaactatattttgtaaaat

SEQ ID NO: 444 - DNA, 398 bp, Plutella xylostella
  misc_feature (1)..(398): Gene targeted: Fit1-2; Universal ID: GS897
ttcacgagttcatcggcggctacatattcctgtcgatgcggtctaaagacgcgaaccagacgctggatgaagaactgttccataaactcaccggtgggtggacgtaggtgtctatggtcgggtttgtctatggtcttttttgttgtttcataaattttaatataagcgaatgtgttggtatggatacggaagccggtttttaagggaattcttacgtggaacggtctactatagtaaataatttcagttcaaactggaattcgcatgagtgccccaagcgacgcaaacactactaagtattgtgaaaatgaacttacaactgaaaaaatatttttaaatataatgtagagctagcctacgaaattcatgaatgtattatacaaactataaatgtttat

SEQ ID NO: 445 - DNA, 486 bp, Plutella xylostella
  misc_feature (1)..(486): Gene targeted: RRM domain-containing protein; Universal ID: GS903
ttaacaaaggctggaccattaaaagaaatacaaaatatgcctatgattaccctcagtgaggttgaaatgtcaaagcaaagagattatctgaacgataaagtaaatattgctcccagcttgaaacgtaattatatatcaaaaaattggaaaaatgaaagtcaaatatgcaagtcaagtattcagtgcaactgttgcatcgaacatgggagaccttgcagacaagaaaatactccctgaagaatgcaaggagactgcagatatattattattattatttgataaattatttgattcagtcaacggtagcttcaataaaaagacgcgtttcgcaaagccgcttttagttccagcaacaccaacatctcttcaccactaaacttgggacgaaggaagaaaaatataaaaaaactatgaaatttgttactgctgtaggggaaaaggaagtggtacccacaattaatagttggttttggacattggaaggaa

SEQ ID NO: 446 - DNA, 276 bp, Plutella xylostella
  misc_feature (1)..(276): Gene targeted: Tc croc; Universal ID: GS906
tcctcccgcaaccaccaccgatctcgagaagaagaaaaacgaaaaacccgcctacagctacaacgcgctcatcatgatggccatccgcagcagccccgagaagagactcactttaaacggcatctacgagtacatcatgaagaacttcccctactacaaagagaacaagcagggctggcagaactccatccgacacaacttgagcctgaacaagtgttttgttaaagtcccgcggcactacgacgaccctggtaaaggtaactactggatgctgga

SEQ ID NO: 447 - DNA, 424 bp, Plutella xylostella
  misc_feature (1)..(424): Gene targeted: Protein kinase; Universal ID: GS889
gaggccctgtataggtgcggatacaaacttaatgataatggttaagtgcagtatgattaattaaactaaatcctttacaatttcggtagttctaattttaaattttatagtttaatggcaataactaattttatttattttataaatcgcagttgcaataagagttgtgttattttatacataaatatatcacgtaggtaattcacatacgaaaaatcctgtgacatcatttacacaatactattgattaattaatatatgtattatgttttataattattaccattagtttgttatagtagaatgagtattttcagaggttagacttatacctaccaccaattacctattggctacctattacttaaagtcgggttctgaaaaaaaccaacaacttgagtgtttcttaagttaactagatact

SEQ ID NO: 448 - DNA, 488 bp, Plutella xylostella
  misc_feature (1)..(488): Gene targeted: Arp3; Universal ID: GS904
cagaacaaagtctggagactgcaaaagctatcaaagagcggtacagctacatttgtcccgacattgccaaagagtttgccaaatatgactctgatccagtgaaatggatgaaaaaatatactggtgtaaacacaattactaaaaacccattttctgttgatgtgggttatgagaggttcttggggcctgaaattttcttccacccagagttttcgaatgctgactttacagtgcctctaaatgaaatggtggatgatgtgattcagtcatgccctattgacgtccggagaggcctgtatggaaacattgtgttgtcaggaggctctactatgtttagagactttggcaggaggctgcaaagagatataaagaggactgtagatgcaagactgaagctatcaacaatgctatctgagggacggatcacaccaaaacccattgatgtccaagtgatctctcacaacatgcagaggtatgcagtgtggttt

SEQ ID NO: 449 - DNA, 478 bp, Plutella xylostella
  misc_feature (1)..(478): Gene targeted: Arp2; Universal ID: GS895
tgcttgaccgaagcagcacgagtcgtacctagtcattaacttaatatttaacaactaattcaaaatgtgcgacgaggaagttgctgcgttggtagtagacaatggctccggtatgtgcaaggccggattcgcgggcgatgacgcgcctcgcgctgtgttcccctcgatcgtgggcaggccacgccaccagggtgtcatggtcggcatgggacagaaggactcgtacgtaggtgacgaggcccagagcaagagaggtatcctcaccctcaagtaccccatcgagcacggtatcgtcaccaactgggacgatatggagaagatctggcaccacaccttctacaacgagctgcgtgtggcgcccgaggagcaccccgtgctgctcacggaggcccccctcaaccccaaggccaacagagagaagatgacacagatcatgttcgagaccttcaacacgcccgccatgtacgtcgccatccag

SEQ ID NO: 450 - DNA, 415 bp, Plutella xylostella
  misc_feature (1)..(415): Gene targeted: TAR DNA-binding protein 43-like Protein; Universal ID: GS890
tattaacactacatctctcgaaatatcacacaggttcatagaccggagtttatgcatcagaaatttattgtcgactgaaaatcgtcaagaagcaaaaagcagtgcagcaatgacatgggatactgaggtatatctttacatttctttgttatctgaaataatagctgatcaacctttatatgtattcaagaattttacctaggtacttgataacaaaacaagatcacttttgaagcagtactatgaatatttgtaggtatggtcccaatgactggtcggtcatccttggataaaaaaatcatccttgactggtctccataataagtagcagcagcgcatatcatggtgctgtgctcaactgctcataactctgtataaggagtgtgttcgcaagattttcaatgttaattaaaaa

SEQ ID NO: 451 - DNA, 484 bp, Plutella xylostella
  misc_feature (1)..(484): Gene targeted: wb; Universal ID: GS898
tcacttcatccgggacagcgagaagtggaaggcagaggacgaccacaggaccatagtgccgctgcagttcaatgctaacacgcagaatattgccgtatctgccaagaactcggaagtagtctacttctcggcaccaccacagttccttggagaccagcgagcctcatacaaccacgacttaaagttcactctgcggctgggtgaagacagaggttacccatcctcccaggacatcatcctggaaggagccaaaacttccatttctatgaacatctacgggcaaaataatccagagccaactgatcagcctcaagaatacacgttccgtctccacgaagattctcgctacggctggacgcctaccctctcaaccttcgagttcatgtctgtactgcaaaacatcacggccattaaagtcagaggaacgtacaaccgagctggtgtcggctatttgatgaacttcaagttggagaccgccaaagaa

SEQ ID NO: 452 - DNA, 488 bp, Plutella xylostella
  misc_feature (1)..(488): Gene targeted: Unknown; Universal ID: GS984
ttggccagcttatggggagcaatgaaagtcagagatggtttagatctaacagatattgtacctgaaaacacggatgaacatgaattcctctcacggcaagagaaatactttggcttctacaacatgtacgctgtcacgcaaggagacttcgaatatcccaccaatcagaagcttctgtacgaatatcacgatcaatttgtcagaataccgaacatcatcaaaaacgacaatggaggcctcacaaagttttggctgagcctgttccgagattggctattagacctgcaagaggcttttgacaaagaagtcgccaatggatgcataacaccagaatattggtgcaagaacgccagtgatgaaggaatcttaggatacaaactcatggtacaaaccggtcatgtggacaatcctattgacaaggctctcatatccaatgactctaaaggacatagattagtcgataaggacggaattattaatcctaaagc

SEQ ID NO: 453 - DNA, 252 bp, Plutella xylostella
  misc_feature (1)..(252): Gene targeted: ara; Universal ID: GS887
cgaacgcgcgccgccggctcaagaaggagaacaagatgacctgggaaccgaagaacaagaccgacgatgacgacgatgccatgctctctgatgatgaaaaagaaaaagacgaccaggacgataagctcaaaactcataaagatgacgagcggaaaagcgatgagttactgcagggaatgcatcaccaattattgggatacggaatcaaagaagaggcaaaaagaggaacatccgattgcggagttccgattc

SEQ ID NO: 454 - DNA, 485 bp, Plutella xylostella
  misc_feature (1)..(485): Gene targeted: Mef2; Universal ID: GS901
tttgtctgtgttgcaatagcaaagagtattaactttattctgttaacttattattaggatgagtattctttgcatttaaataaattgtagtgttaagtatgggtacggatatcatattctggcatgcagtgcagtcttataaatgtttacattttgctattgcttcgcagtgtcctgtgaacaaccctcgtaatgtaaggacttgaatacatatccctttttgaatactcaactagatttcatgatttcacctttaacatcatcagttgtgcaatacaatatttatggaagtgcttattagttagtattaggtatatttttgtttgaatttacaatgaatgcaaaaatgatcatctgttgtattttatcgatatttttactgatctgtataccccgttatctgtacagtgccacaaacttatctgttccggtgacagctcacgtaaatgtgtaatatttcttcactctataagattttaagtttg

SEQ ID NO: 455 - DNA, 363 bp, Plutella xylostella
  misc_feature (1)..(363): Gene targeted: FA elongase; Universal ID: GS902
ggaccaacccgtggttcctgatgagttcacccttccccacattactaatatgtttaagttatgtatatctagtcaaggttttaggaccacggtttatggaaaataggaaaccttatgaattaaaaaatgttttaatagcatacaacgccttccaagtaatattcagcacatggctcttttatgagagtttgatgggaggctggctgcgtcattacagctttaggtgccaacctgtggactattcagacagtcctattgccactagaatggtacacgcctgctggtggtactatttctccaagttcacagaattcttcgacacgttcttctttgtgctaagaaagaagttcgaccatgtgtcga

SEQ ID NO: 456 - DNA, 480 bp, Plutella xylostella
  misc_feature (1)..(480): Gene targeted: Uncharacterized protein; Universal ID: GS892
ttagcatgtagagtacccgtgaaaatcgacgaaaaataatgatttaaacagtgatactcgtatatctttttagtgtaaaagacaaaatccatcaaaatggatatgtcggaagtaaaagcgttcaacgcggagttatccgggttgtacgacaacaagccgcctatatcaaaggcgaagatgagtgctatcaccagaggtgctatcaaggccataaaattctataaacatgtagtacacagtgtcgaaaagttcatacaaaaatgcaagcctgagtacaaagttcctgggctatacgtgatagattccatagtacgacagtcaaggcaccagtttgggcaagacaaagatgttttcgcaccgcgctttgccaaaaatatgcaacaaacctttgcaaacctctttagatgtccgcctgaagataagcgcaacataatccgagtgctgaacctctggcagaagaacaatgtgtttggtccagac

SEQ ID NO: 457 - DNA, 374 bp, Plutella xylostella
  misc_feature (1)..(374): Gene targeted: Translocase of inner mitochondrial membrane 23; Universal ID: GS905
tctacaccctcgtcaccgacaatgacaacatatggagcaaagcccaatacaaccgattgtgatcactctatcccaaaaaagattcagaactattttctttacatagctcttattgtagggttatgtgaataacatagatttaatttaataattagccatatttaggacttatgtacataataatagactgttatttttagtttatgttaatcaacgccaaaggatctgttacatgtattggggcttagttattccatgtttcggtactactaatagtccacaggcacagctgtacatggtaagcctgcacgttgtttgaatcgcctatcaattgcaggagtagcacaatttataataattataaatacttaagc

SEQ ID NO: 458 - DNA, 371 bp, Plutella xylostella
  misc_feature (1)..(371): Gene targeted: Pax2; Universal ID: GS891
gctgcccgcagaagtatcagatatcaaaatgctgaaactacagtcgagattccggaaaaaaaccatctgacaacccttcagaactttagtgacaatgtgacttaaaagtgacaaatctgtcagactaacacaaaaagttccctaacattcaagaatactcctcaaattctcttcacacgctagttataaatttagtttaacaaaccacaacaaaacaacaattaaaagtgccaataacagtgcaaaaacaactcaagtgtcaaaaaaactgtcaaaagtccatcgacctccaacgattcaaacacgtgccagaattcgaattgccagttcgaatttagagttcggaattcaaattttagttttgtcaaatt

SEQ ID NO: 459 - DNA, 422 bp, Plutella xylostella
  misc_feature (1)..(422): Gene targeted: Vrp1; Universal ID: GS893
cagtgtaacctgcacggttgattttctcctcaattattggtaataattaaataaataggggaagactgataggggaagcgtagcgtcggatgttaggtataataaaatcataaggaaatgtgattgagtaacttgtaggtacgtattgtagtaggtataatttgtataatgttaatcagtattcattactcacgttattctgaatcattgctagtcgtcgttcatgtatttaaccatctgtaaaggacgtgccaataagggtgtgttcacaaatagctaagggttgtgaattattttgtagcttcgctctttttataggaaatactactagtattattctaaataaatagtactaacgacttggtacatatcgtaaaattactcgttaggtactgttagcaatatatgtaaatcttaaagag

SEQ ID NO: 460 - DNA, 321 bp, Plutella xylostella
  misc_feature (1)..(321): Gene targeted: dre4-CG1828; Universal ID: GS886
ccagaatacgtggcccgtgtattttctgtgtgaatttcgtatcttgtttatattttttattgcaattattcacttataaatagcccaaaaaccgtgaacaagttgccagtacaagatgatgaatccacagttcatgcctcctgggcaaaacaacaatgcaccaaccaacccacttgggtatcctccatcatcacaagatattaatggtcaccaaaaccctaacatgtatagccagatgccaagcaatggacaacccatgccaccaatgaatgacatggcacagaagatgcaaggcatgaacttaaacgggcctcaaggatt

SEQ ID NO: 461 - DNA, 409 bp, Plutella xylostella
  misc_feature (1)..(409): Gene targeted: Dhx15; Universal ID: GS896
acacccgtccagcgcgctgtttaataggcaacctgaatgggtaatctaccacgagctggtgcaaacgaccaaggagtacatgcgcgaggtgaccacgatcgaccccaagtggctggtggagttcgcgccggccttcttcaagttctccgaccccaccaagctgtccaagttcaagaagaaccagagactcgagccgctctacaacaagtatgaggagcccaacgcctggcgcatatctagagtgcgccggcgcaggaattagacggttatttatgttatgttaagtgaagtatgtattgagtgaaaaggcaaaataaagttttagttttaaggaatgcgggttttattatacttacgttatgtattagtctatgggtacttatttgaagatccgaaaaattgacgacga

SEQ ID NO: 462 - DNA, 447 bp, Plutella xylostella
  misc_feature (1)..(447): Gene targeted: CG40470; Universal ID: GS888
caccctcttccacttcctccacaacaactggcaggcgctcaagttgaagtacaccagccaaaccactctctggaacagtctgatcaccgctgccacctcccagttcaccactcaggaaggcctggacctggtctccaagctcctcgtagaccatcagggagaattcggctccgctgaacacatcatcgagaagtccgtcagaaacatcagggtcgaagccaagtggtccgccgagaacctgccagtcatagagaaatggctcgacacttacctcgagaatgacaaggaaatacaacgcaagggttagatggtgatgttggtgaaacaggtgtagttgtaagcgtacttttctattgaaaagaaagtctttagtcattttgtgtaatgccagtattgtcttttgctactaagtaggtaagtacttccatatacatcgtggaaactgta

SEQ ID NO: 463 - DNA, 487 bp, Plutella xylostella
  misc_feature (1)..(487): Gene targeted: Rpl40; Universal ID: GS927
ttgagactgcactagccaagttcaaaaagattattgaaaagtattatgatgaaattggaatattcagttcaaaaggtaatgatatctacaatgtgcagaagggatgcatcaggaccaactgcctggactgcctggaccggaccaacgccatacagaccttcatcggcctggagatgttgagtattcagctcatgctgctgcagtgcattgacaagaaacagaatgtgacaagatttgaggaagtattcaaacaaatgtgggtgaataatggtaatgaagtctcgaaaatatatgcaggtacaggagccatccaggggggctccaaactcatagatggagcccggtctgccgcccgaaccatccaaaacaacttattagacaactcaaaacaagaagctattgacatactgctccttggctccaccctgaattcagaactctcagacagaactaggatattgttaccatcaagtattctacacacatc

SEQ ID NO: 464 - DNA, 393 bp, Plutella xylostella
  misc_feature (1)..(393): Gene targeted: Rps21; Universal ID: GS937
gtctgagcggagctgtgaggaatatcagtgtattagatagatatataaacagtgactgggtacctccttctcacattgtggtatgttgacgccttctaaagtattattgttattaatgtactcgagtagacgagcgagaaaccattgtacacttctcgtatattccttgttgttgtttattgatacctatattttttacatgtagtcgtgttcatcaatattcatctctattttttgtaataaccacgtttgacatgtttggcggaattgcaataagaattgtcattgctggtacaaaattttatatcccttctgtgatccacaatagtgagaacaaatataacatttataaatatgaatctagcaagagaatatacctaacataatgatgta

SEQ ID NO: 465 - DNA, 468 bp, Plutella xylostella
  misc_feature (1)..(468): Gene targeted: RpL3; Universal ID: GS938
cgtcacggacgcgattcgagacagttgcttgtggaacctgtgttcaaattaaaaacaaaaaactgtgtaaagagtgaaaattctttaataaacttagcagaaacttatagtatatcatattgcgcgagttataaactatacagattgagacaaagttgtgttttaagtgcaaatttagtgcaaattcgattgttcaccagtattgtgcggtagtactaccccgtgtttttgtttacgtttttgcggtcagctgtttaaaaatcagctgttgttagacagctgtcgctgtcacttgtcaaacaagagcaccatctagtggcgtacttaagaacttcaaggtatactacattgtacgaataaaatggcaaacaagtgcaccagttgcggaaagttccactcatcgacagatggcgttgtttgtgggatttgcgccggatcatttcacagggaatgcgcaggattgctaga

SEQ ID NO: 466 - DNA, 488 bp, Plutella xylostella
  misc_feature (1)..(488): Gene targeted: Vps28; Universal ID: GS939
aaggaccgcgcggagttttgaaaaggaacttcaagcacttggctgttgacattcgcatggtgaacccgcgagtcctgaaggtagaaaaatggtttggctccaagaaggaactcgctgccgtgaggactgtctgctcacacgttgagaacatgatcaaaggtgtaaccaagggattccagtacaaaatgcgttccgtatacgcccatttccccatcaactgtgtcacaactgagggcaactcagtcattgagatccgtaacttccttggtgaaaaatacatcaggagggtaaagatggcacctggtgtgaccgttgtcaactcacccaaacagaaggatgagctgatcattgaaggcaactccctggaggatgtgtcgagctctgcggctcttatccaacaatcaaccacagtgaaaaacaaggacatcagaaagttcttagacggtctttatgtgtctgagaaaacaactgttgaagtggatgagatt

SEQ ID NO: 467 - DNA, 480 bp, Plutella xylostella
  misc_feature (1)..(480): Gene targeted: Sec23A; Universal ID: GS928
attatgctcggttcagatgtaaaatagaactatgtaaaataaaattatctaattttaaagttacatggactacggcacgaaatttacaacataataattattaaattagaagaaggtactagagccgctcacaatttgcctattcaatacaatttacaaattttagaacggctacatagtttcgaacattggcctgattctgcatatattaattttattgtagaatcaggagattgttattcataaatagagaaacgaaaattgtattctgttaaacagctttagatttggtgaggaataacaggagaactaaggctgtaccttcgtttagcaccatgtttagttgttacccaactgcccgtaaggagggttattatattacgacaatgccttaaaatagtaacaatacagcgagtccacagcaaacaaacttattattatattgcgactgaaacaagacaagtaaataattataattag

SEQ ID NO: 468 - DNA, 318 bp, Plutella xylostella
  misc_feature (1)..(318): Gene targeted: Sec6; Universal ID: GS929
ttgttttagctaatgttttgatgtgtattattttacgaaattttgtaaatttggttgtttattaacttgaatctaagtttgttcaacgcctagtagaggtgaaggtttaataaatgtgtactttgttcttaatcaaataattttcataaggtaaataaataaaataatgagctccatggaggaaattgaagaagaagcgaaggcgatggcagaaaagatggtcatgaatatgatgcagcgccccggccaacttgaaaaggtggaacaatacaaaaggagaataactcataagaaagcatctattgaggcgcaactgaa

SEQ ID NO: 469 - DNA, 487 bp, Plutella xylostella
  misc_feature (1)..(487): Gene targeted: vATPase-Vha26; Universal ID: GS940
tatgtataatattaaatgcgtacaacattattaacatgtatgaaagaatccgtattaagtcagaaaatgtattacaatagtaagtgcgatcatgtggatttctgatttcgtggtaggtttaacgttcactcttaatgtacattagttaccgccttaacgtaatgttcgaacagtgtctaagtattatattactacaattcattcgtgtaacactagttatatattagcttagctgtagcttttaggagacacagttaaattgaaatgttataccgatgcttgatggtaggacaaacttattggtgtgtaagcgtaagcattttattgatataattctggattgttgccataacaattattacacaaatagatgttatcgatagtcgatgtaatggagtaagtgacagcgcactttcgatggaaaaagcacaagttacaaacttcacgacagggcgacgtcaatacttagatatataaatgtggtaaa

SEQ ID NO: 470 - DNA, 479 bp, Plutella xylostella
  misc_feature (1)..(479): Gene targeted: Vps16A; Universal ID: GS941
aagcaaaacaaaggcagattcttgtgatgaatttgtttgatttgatgatattttttctaaaagcgatggaataaccaacctaactaatttctaatgtgtactgtaaagtaatgtaaacacaattagcgaaaaatagtgctctctttatacaatataaatctaacaaaattgattacggccacgtaaagtaaattgtgcaaaccaataacagttaaaaagtgatttgttcctaaatttgcaaacatgtcggctcttcttaccgctgattggttccaactagattcctattataggaaatttgaccagtacacaatgaactgggctatggatgaggggttggacaatatgatagttaccggagccccatatggaggccctattgctgtgatacgggacaggaagcagtttgtgcgagtcgtcactcagtccaaaccagttataaccatctataactgtgttggaaacattatatcaaaaat

SEQ ID NO: 471 - DNA, 488 bp, Plutella xylostella
  misc_feature (1)..(488): Gene targeted: UEV1a; Universal ID: GS930
cgacgccattatactatctgtcaaatatttcaaattgaagaagtcgctcgattgttcaacagaaaattggaggcaatctattgtaactgctttaattttatcgaccttagtatggctcaaaacatcaatcctcattattcttcgtcctctaatcccgagaaacagaacgagggcacgattaaactgaaagacaatcacgctgtaagcaaaagactgcagaaagagttgatggagctgatgcgatgcgctgacaagggcatttcggcatttccagagagtgaaaacctatttaagtggataggcaccattaacggcccgctggagacagtttacgcgggacacaagtacaaactgtccctggagttccccaactcgtatccctacgctcctcccgttgtgaagtttgtgactccgtgctttcaccccaatgtggacacctgtggtttgatttgtttggacattttaaaagacaagtggacagctttgta

SEQ ID NO: 472 - DNA, 481 bp, Plutella xylostella
  misc_feature (1)..(481): Gene targeted: relish; Universal ID: GS931
tcggcttccgtggcatgggcataatacatacagcgaagaaagatgttcccgcactcctatacaagaaattgattgagagactgccacatttcaatgcccgtgagctgaaggcccagtgtgagaacgaagctcggagtataaacctcaacatcgtgcgcctcaagttcagtgcgcacaatgtggacacggacgaggagatatgcgcgccggtgttctcggaacctatccacaatatgaaaagcgctgcgacgaacgacctgaagatctgccgcatgagccgcacgtcggggcgcccgcgcggcggcgacgacgtctacctactcaccgagaaagttaacaaaaagaacatcgacattcgcttcgtgcaactggagcgcggcgaggtctgctggaccggcaaggccaggttcctcatgagcgacgtgcaccaccagtacgctattgtgatcagaacaccagcatacaagaaccccgagattac

SEQ ID NO: 473 - DNA, 483 bp, Plutella xylostella
  misc_feature (1)..(483): Gene targeted: diptericin; Universal ID: GS963
attgcctaaattgtggcaccaagcacagatcgctaactcgggtgtaggaacgtggcaaattaaagtttaaaattagctgtttaaagttttaaaagacattggtgtcggtcggattagctcgataggcgtttgttcactcgatttatattatagttgagatgttacccaacgtaatttttactcggtcggtgagcttcgacgattcccctcagtattctcactgtcttcacccactgttttgcgatatccaccgatttgaagacagaaataaaaataaggttgtgagctctattcacattgaaattttaagccacatttgtgcttgtgcaataaatatcacagtttggatctaggcttgtaaattaatatagaatatatacattgttgagctgattataaaaatttaatatattattataccttttaatattgttaaagaattctaattgcattccacatcttagagtgaacgaatttgagata

SEQ ID NO: 474 - DNA, 442 bp, Plutella xylostella
  misc_feature (1)..(442): Gene targeted: spirit; Universal ID: GS964
cagccgtgcggcgctcacgttatgataggtggtgctaggttaatgatgcagtaggttattttattagtagggttttttattgttgttgtatggatatctatttatacgattattttaaaacgcagaccaaactacaccggttatagtccagaaaattcatacaatcagtagtctaaatccgggcttaaacctaaactgtgtttagtcttagttttgtaataaggatctaagagttttatatttgtataacatataagcctcgctcatggggtatgtgaaaagttacaatatctcaggggcctatgtgacgaaaaaccaagtttcggagcgctagccacgactctatcccgttgtattaaactaaccgattgcacgctcgttcgttcctttttcgtcagtaaccctccagttactcttctagggcaatctaattccatgacaa

SEQ ID NO: 475 - DNA, 351 bp, Plutella xylostella
  misc_feature (1)..(351): Gene targeted: sphynx; Universal ID: GS948
cccgaagtcaggctaatgtctacgttgtgtcacggatcagttgtgtctaataaaaaaatctaatgctgtttgtgtaaccatttactatcgctttaaggaacggtcgtttaaattatttcaaatttattattagctagatgatatttgggaaaaatacccattctttggatctatcagtgataaaatttcactctgtaaaacagtataaatgcctgtcgtcgcaagtccacagcctgaataaaacaaaaagcggtttgattctgaattgcaaatgaaaatagcaggcgcttgttaaaatacaacattgcaggaactgacaaaaatatacagagaagtgaagggagtgtacct

SEQ ID NO: 476 - DNA, 487 bp, Plutella xylostella
  misc_feature (1)..(487): Gene targeted: grass; Universal ID: GS957
ccgtgtgatagcgaaggctttagagaccttcaaagcgtagatgaagatatcacttgattcatgcaacaaaatagcgagactttcatgccttcgtttacacgtaaaacaagtacgtagggctctatgaactatctcaatattataatgtctcatttggtttcactgatcaactcatcattcttaactaagagccaaaagttttaaatatttgtgaagtcatgaagaaaattttgttttaaacaaagacatattgatggtgatgtgaattataaacaatggagtggaaaccactagcaggcacaggattatagcgtggtacctcccggtagtcactagcccggtagtggttgcatgtgctaggcggagtagacaacaatctcaaacctccagcagtagacaatttttgactaattgactaaatacaatgaagttgaagaaaatactgcataaaattgtctactgtacacacggcaacgttaaatggttg

SEQ ID NO: 477 - DNA, 479 bp, Plutella xylostella
  misc_feature (1)..(479): Gene targeted: pelle; Universal ID: GS953
cataggtcatagggcctttgaagcaatgatacttagggctaccaaaactcaaatttctgtgaaaacaaatgaggttttacggctgtattttgaagtagatcttcgtcagtacgtctactaacgacgggtttggtagttggtcgaaaactataaaagttttatcgtaaacaaggagagtggaaattattattaaactttgacaaaagaaaaccaaaacttgttactgatatacactgaaatatgcaaaagtattgtggaatgctggacagctagtagatagggctacaacttcggtttgctataatataatgtagaaagtattatgttgagaaaatagtacggatgtctattgtgtatgatgtatatttatatattttattctttatacgtttcaagtcaatactacttatgaatttaacgctgtgttaataatgtcttccattgtagataggtaataaatgttattgttagaatcaaaa

SEQ ID NO: 478 - DNA, 488 bp, Plutella xylostella
  misc_feature (1)..(488): Gene targeted: DIF; Universal ID: GS951
ccggtagatggcagcaagtttcacaactaaactgttggctcccaagtttgatatcaaattgatttgagaaggagttatgatcggttgattaaatggtgtcctaacgcctgttttacgaaattgcttgcgaaatgagttagatatttccaaagtgtggaaactcagaaagcatcgcgatgcagctccgcccttgtctgccaaattttgcgacttttatatttcgttttagatttaagatgcatgttgatgtgcgaaattcagctaccgagattcttgcctctgtaacaaaactagtctaatttattctagtcctagatgatgggaatgtaatttttgtgtgacgttatgtttaatgtttatttcgtatgttttagatccgaattatctgaagcgaaagcgacagaaaccgatacagaacttcagtcggtacttacagccgatcgatagcgagatgaagcagcagctgccggactacttccaggacaaca

SEQ ID NO: 479 - DNA, 474 bp, Plutella xylostella
  misc_feature (1)..(474): Gene targeted: Effete; Universal ID: GS958
tttagtaaatgtagcgtgctacaatccagactgaacttctataaaaaacaattgaagtaatcagttttctttcatccacaatatcctgattgtaaagaaggaaaacgctccaatagctgcatctttataaattacagtgtatctcataagttacgataatctagtttttttcaatatggcgttctttataattttatctaatatatattgtggttgtaaggatacctgcgttgtgatttccatgaatttatccacttcctaatccactatcctctattgatggcagtcattccgaactcaagacgagactagcaactggtacaatagacggcacgagcggcaaacatggtgtgttctttcagctgcaagatcgaagcttctaatcactttattaacacagggaaaaattgaattcaaggctttcaaattgtactctcaaacttgtatttagcttcactaaattgtaagaaacaa

SEQ ID NO: 480 - DNA, 461 bp, Plutella xylostella
  misc_feature (1)..(461): Gene targeted: spheroide; Universal ID: GS960
ttataccttacggcgcgttcatacctgatggatctcaagcaatagtttcggggtatggtgtcactgaatccgcaactgcatcaagaacccttcgttctgcgacggtgaacatcgtgcctcaatcggcatgcttacgcgcctacctgtccatagctacggtcacctctgaaatgatatgtgctgttggagccaacccggggaaagacgcatgccaaggtgattctgggggaccgctggcgtacaatggctacctgatcggtctggtctcgtggggggaaggctgtgctgatgtgaggtaccccggtgtgtatacacgagtctcagtgtatactaagtggatacaggaagttttggataaaattgataagaatacggtttgaggaaaatttagaataaaaagtacggtgattttttgaaacagtacctatgtaataataatgtcttggttgtgttatgatatt

SEQ ID NO: 481 - DNA, 439 bp, Plutella xylostella
  misc_feature (1)..(439): Gene targeted: Toll; Universal ID: GS952
cgaccccactagcgtatcactacaactacgataaaacaatgtttttataacacgaaattaataacataaactgttactgtagaagaatctagtgtgtaatactcgtcatttgcaagattctgtgcgtgaaacacatgtgaacagttaagttacgtttcgaaagacagtgaaaattaccggacagtgaatttgtgttacgaattataagaaaggatgtgctttaccacgacaaggacaatttgttaaagtgacgccgaattggacctcacaaattgatggattctctacgtccggcaaggggagatagaaaacgaacgccgacggaaaaaacatgacactgagcctaaagtgtcttgttttctttcttccttgatatttgattttccccaaaatggcttgccaacattttacttcaactagacaactttttggacaagtc

SEQ ID NO: 482 - DNA, 478 bp, Plutella xylostella
  misc_feature (1)..(478): Gene targeted: Tab2; Universal ID: GS961
cagccgttattggctctattgattcaactgaagaagaagaagagacaaaattcaacactgatgccaatcaaaatgttgttgagcacaataagaatttaaaccacaagaataacaatgctacgtcaccagtaactgttataaatattgataactgtatagctaagtacacagcgcaaacaccaagcgagcatgaactaacaaacgaagaggccactccagaaatcactataaatgcagacagtgcaacagagagtaaggaaaaggagttagaacaaccaggaagcggaaactacaggattcataaaagcaataaagtgaaatgcaacctcaatgaaaaactagagaaacataaagaaaagaaatccatcaagaaagaggaacaacctgaacaagaaactgaaaatatcccacaagaaaaaccaaaaaggccaaacaccctagagttcttgaaaccaattccagatattgcatttaaaga

SEQ ID NO: 483 - DNA, 488 bp, Plutella xylostella
  misc_feature (1)..(488): Gene targeted: caudal; Universal ID: GS955
tattcatgcgaggatattctagaccgcttgtgttccattttgccgctatcagaagatctcttgataagtttactattctgtttaataggctgtgttgtttagacaaaggactcgtttaactgacaacaccggtgatacaatcttaaataaatacagtctattgaaatcagaatcacaggtttaacaaattggaaatggaagtggtagcacgctttattatttaatttttactgaacgatgtaaaacaattcgataatttgaatgtcaattttcattgtaaatataaatgcctatatttttatattataattatattgattaaaattattatttgtaaatgaatgcaaatggtatttctcaatgccacaagtgccttatctttaaaattatgtggtcactgaaatagtttggagttgtataaattaaattgttgatatttaatagttatagctttaagcggcaataccagatacatttcattattttat

SEQ ID NO: 484 - DNA, 488 bp, Plutella xylostella
  misc_feature (1)..(488): Gene targeted: methonine-rich_storage_protein; Universal ID: GS949
tccggctggttcaacaacgtaaaccaggaacagaagctgtcttacttcaccgaggacatcggccttaacacttactactactacttccacaccagcatgcctttctggatgaacggtgaggaattcggagtcctgaaggaacgcaggggagagatctacttcaacttctaccagcagctgttggcccgttactacttcgagcgtctgaccaacggacttggtgagatccccgagctgtcctggaggtggcccatcaagaccggctacgtgccccacatggtcaaccacaacctgcagccgttcgtgtccaggaacaactactaccagatccagaacgaagacaacatgcgcgacctcgaatacttggaatcctacgagaagcagttcctgcaatacctggaagctggcaaattcaaggcctacaacaaggaagtcgacttcagcgactacaagtccgtcaacttcgtcggaaacttctggcaatccaa

SEQ ID NO: 485 - DNA, 465 bp, Plutella xylostella
  misc_feature (1)..(465): Gene targeted: Insulin_receptor_1; Universal ID: GS947
cagaacagttccgcggctgtacgcatgtcaagggcaccctcactatcacactgagggctagtggcggaaacaccatggccgaactggagacatttctgggcgagatccgcgagatcgagggatacctgaaagtaatcagatcacactctctggtatccttgagcttcctcaaaagcctcagacgcattgttggcaaagacactgataacactgggaaaaaccagtcgttctacatattcaacaatcccaacttggagctgctctggaactggacgaagcacggccctatcgagataatgaacggcaacctgttcatacacttcaacccgaagctgtgctataacctgatcgagccgctgatgaccatgactcgtataccgaaagtaaagtttgatgagctggaggtctccgcggagaacaacggagatcaagcttcttgcttccaagacatcctgcacctccaag

SEQ ID NO: 486 - DNA, 486 bp, Plutella xylostella
  misc_feature (1)..(486): Gene targeted: Sh - Shaker; Universal ID: GS950
taatcggggtcatatcagtgtttttcatatgcgtctccatcatatcgttctgtttaaaaacgcatccggacatgagagtgccagtgatacggaactacacagtgacgacggccaaccagacgcagagctgggcgttggacaaagtgcaaacaaacgcccacgtggccttcttttacatagagtgtgtgtgcaacgcgtggttcacactcgagatcctcgtgcggttcatatcctccccaaacaagtgcgagttcatcaagtcctcggtgaacatcatcgactacgtggccaccatgagcttctacatcgacctcacgctgcagaagtacgcgtcgcacgtcgagaacgccgacattctcgagttcttctcgatcattaggatcatgagactgttcaagctgaccaggcattcgtctggtctgaaaattttgattcaaacgtttagagcgtcggcgaaagagttgacgctattagtgtttttccttg

SEQ ID NO: 487 - DNA, 480 bp, Plutella xylostella
  misc_feature (1)..(480): Gene targeted: SK - small conductance calcium-activated potassium channel; Universal ID: GS962
tagtgccggatattcagtagaagacttaaatgatttagtttagtgtcaattcgcttaaaaaacccgctttaaatccttgtctcaaactttttcaaacattatcccaacccgttggtccaaaaccgtgacttaatgtaatccaatatcaatttatatcaataaatatattccatatctctacttcgtagtgtttaatagttcttataatatacctaataactaactatatcactggtgcgaggaccaaagctgtgctaagtactttaactcaactatcgattagtttgaacctttcctaaacaatcgaaaacttcagtagtgtctgtaaatagtggccaacagtgtgtgtagtgcctagtgatattggaaaactcctgaaagtaacaaagaagtttctaactacgttggtggcgaagaatattgattgccggttgaaaaaggtcacctaagtcttgcagttagacctaaattaagaaaaca

SEQ ID NO: 488 - DNA, 488 bp, Plutella xylostella
  misc_feature (1)..(488): Gene targeted: chitinase1; Universal ID: GS954
cgcgctaaaggattccttgcttattatgagatatgcgaacgcataaaggacaaagggtggatggttcaaaaagatccgttaggacgtatgggaccgtatgcttataagggcgaccagtgggtatcatacgatgacatggatattttgaaatccaaggttaacttaatcaagacaatggaactaggcggaggcatggtttgggcacttgatttggatgactttagaaatagatgcggacaaggcaagcacccactactaaacacaataaagcaaggattactggaccctaaaatatacaaagaaaccataataatatctaagccaatcaacaactttttgaacgatgacctagaagacattgaagtaataccgagctacaccaagaaaacaacgacaacgccgcggccagaagccaccacgcaattagccccgatgcataccactaggaaacctgtaaaaccagcagcagaagaaagatacaaagtagt

SEQ ID NO: 489 - DNA, 488 bp, Plutella xylostella
  misc_feature (1)..(488): Gene targeted: ATPase; Universal ID: GS959
tatggataatacagaggtgtatgatttgttgtgtatattagattttaataatgttaggaaaagaatgtccgtgatattaagaaagaaggatgatggtgaaattaggttatatacaaaaggtgctgataatgtaatatacgacagattaaaagcaagcgaaacagaagtcaaggcgaaaacccaggagcatttaaataaattcgcgggcgaaggtctccgcacgctggcgctggcgtggcggccgctggacgagcgatacttcaacgagtggaagcggcggcaccaggcggccgccctggctatacatgaccgcgacgagcagttggacgctatctatgaagaaatagagacggatttgcaactcgtcggtgtaacagcaatagaagacaaattacaagatggtgtgccagagacaatagcgaaccttagtatggccggcatcaagatatgggtcttaactggagataaacaagaaacagcgataaaca

SEQ ID NO: 490 - DNA, 470 bp, Plutella xylostella
  misc_feature (1)..(470): Gene targeted: Vacuolar ATPase A; Universal ID: GS956
ttgaatgattgttttcgtcggttcatataccctgttgcattccagcttatttttagatagttaaaacaacaaatcggttatttttactaatcatacattttatgaaatctttctttttgttttgcttacgtacagtgaatcgttgccatataattatgtatttaatagaatgctgttttagctttttagacggcaatatttttgagatttgagctttcatctaactaacttttaatcatgttgcagtgttcagtattataaattatatttttttcccgccaagagaatgcacgtgttttgaataacattatatcttgtagttcgtacttgcatagctaagtgtttcaataagattatgtacaaaataacgtgttctacgcaataaagtatatgatatctcgctgttttaacttctgtggcgttacgtgggagacgaaagttataaataaatataaagtatacaaattgta

SEQ ID NO: 491 - DNA, 463 bp, Plutella xylostella
  misc_feature (1)..(463): Gene targeted: methionine_rich_storage_protein (hexamerin homolog); Universal ID: GS1009
ttataaatttttcttaatatttgtgatcatttatgaacacactcctcaaccacctgctcatttttacagcacccacttcctagacttcataaaatactcgttatccccattctcgatgacatgcttcctttccatgtataaatctaactttctcttgtcctctctttgcagttgacaatgagttcatcgccaagcagaggaaggtgctgtcgctgctgcagcacatcacgcaggtgaacgtggacgccgagtactacaagatcggcaaggaatacgacatcgagcacaacttcgaacactacaccaacaagaaggccgtcgaagagttcctgacctactacaggcatggcatgctcccccatgacgccatcttctccgtctacaacgaggagtgcagggacgaggccatcgccctctaccacctgttctactacgccaaggacttcgagaccttctacaagac

SEQ ID NO: 492 - DNA, 365 bp, Plutella xylostella
  misc_feature (1)..(365): Gene targeted: chitinase; Universal ID: GS1001
taaaacatgtttggaaatagtgtcacgcaaatataaggtgccgctgaaataaatcaacatttactagttttaagtttacaataagtgctaagaataatttattacagcttttagcattgccgtactaagtaattgtatgttcttacaatgaactttttacgctaatgttacacattctttaaagttaagtaaaagttaaaataaggagttatttgctatttccaatatattcgacttaaataatgttaaatgtgtgttcagtaaataaattttgacttctacataagtcaagattgtatttacaatatagggacgtaaactaagactgcatttaaaaatagtgtaatttgtaaaatacaaaacat

SEQ ID NO: 493 - DNA, 477 bp, Plutella xylostella
  misc_feature (1)..(477): Gene targeted: troponin; Universal ID: GS1249
atcattgaggagaggtgcggtaaacccaagaacgttgaagatgcaaacgaagatgcgcttgtgagggtttgcaaagaataccacacccgcatcggacagctcgaagacgagaagttcgatctggaatacatcgttaaaagaaaagatatggagatctcggacctgaactctcaagtcaacgaccttagaggcaaattcgtcaaacccacactaaagaaggtgtccaaatacgagaacaaattcgccaagctccagaaaaaggcggccgaattcaacttccgtaaccagttgaaggtcgtcaaaaagaaggaattcacccttgaagaagaagacaaagagaaaaaaccagactggtccaagggcaagccaggagatcagaaggtaaaagaggaagaggttgaggcatgaactgtaactcacccccacctactgtaagacctgtactctaagtcaattgacaattgttattaactatca

SEQ ID NO: 494 - DNA, 488 bp, Plutella xylostella
  misc_feature (1)..(488): Gene targeted: P102; Universal ID: GS1256
aagtgcagctgcgcttttgaaaacgtattcatggctgaactcaagtctaacactgttttgggtctgcacagctggttgttcttcgctaagcgagagttggaccacaaggccaactacttgggttacatcgataaattggacctgggaggaaaagggctaatcctcaagcagcactcggtcctcagcgaaacaaaagacgctcccgagatcacgatgttcgtgggcacatctccggagctggagacagctctgtacaccctgtgctacctcgccaggcccgaccagctctgcaagctgagggctcctaataatgtagcttttagcatacagactaagaccatcagggctgataacctgcctgtcattgatacggcttcgccggttttctaatcagtgaattgtattagaattaggcccagttttaccatactctgttagatcataacaagggattagttcatcaattatacgtcatcttcatattgaat

SEQ ID NO: 495 - DNA, 561 bp, Plutella xylostella
  misc_feature (1)..(561): Sodium/potassium-transporting ATPase subunit alpha-B; AT1B_ARTSF
cgttccatgctacactctgccctgtattacgtatgataaatatccatcgttgggcgttcgttgggccggtctgtacgcagctttagtagtaagtggtctcattgcaaattcccccgagcttgttgtttcttatgcagtactttctcaattcatcaaatgtcaataagaatactgaaaaaggtagcgataggaaccaccatctgaaatataagggatatgcattgaagaatgtgttaacgccgggaatgtaacagatacatatcgccaggcacagttcgaacaccaaccccacattcaaaacatgattcttcattccaatccggaacacagagttgtaccgggtccggcagacgactccattcatcatctgtgtaagcactatggccacgaagtaggcggcttgcgacgcgcgctccacctccttgcgttcggcgtaggtccactcctggccgagagagtcttgcacgtccgtgacggctgggttgtcccaacggtctcttataccaaaaaggtcttgcggataaaacccgaactcggccatgaccacaaagtaggcgaaca

SEQ ID NO: 496 - DNA, 1762 bp, Plutella xylostella
  misc_feature (1)..(1762): Lac; LACH_DROME
gaggaatatattatgttgttatcgtgaaatatcttgagccttaaataaataatttatctcagacttacaaagtatcaaatttacagccattatcagctgagaactgagaatgtttaaggattcttcgctaattataggtacctccgggtatactcacctgaaatcggttcatgattttgaacctaggtcagtattttgtggtatctccaataatattagctacatagaaacccattaaaatttaacaagttaaacttcaaaataaagtgagctccaaatagtcatgacagttccactaaggcaaggaataacatacagcacagacaaacagacaatcagactttagaacgtatagaagtatctgacgacaactaccaggagagcatagagcggcggtggtagatggtgcgtgaggtgggacgaggcggggcgcgcgcgggacgaggtagaccgggttcgctgccacgccgccccggagaccatcggctcttccgcgccgaagccattcatgctcagctctagcctatgcaagctgacttggctctccatcttcccgagcgcattgacggacgcacagacatacgtcccatagtctcctggtgccagcgcacggatcgtgaggttcatccacagagagaacgcgttcagggccttctcggtgatccggaacttggggttctcgaggatcttgtcgctgactagagaatactcaccgtcttcccggtaccaggagttcatggctttaggagaggcctcgatgtagcactgcagctccacgtcgctgcccggcggcgcgccgactagctggttcgtcacttttacttgcggtaggaagtgcacctgcacgctgtaccggcggctgacgctgggcgggaccccgttgctggcgatgcagtagtagttgcccatgtccgcgcgctgcacgtgggacagctccagcgtctccccgcggtgggagtccaccactttcctctccctcccgccttcatgcctaaacacgatgggtcggttgtgctcccgtcgccacatgacggccggcgcggggacccccgtggccgtgcaggtcagcctgatgctgcccccttcccgcgccgagctgccctccgtggccgtgtccacgatgtcagggggtatcaccacggagaggtggcccatctgcatctgcatgggctgcgtgttgacctggcacatgtaggtgccggagtcgttggcctgcacgttgtacacgtgcagcttccacgtgttgtggttgttgtaggtgaccgccaggcgcgggttcagcgccaccatgctcgtgtggatggccaggatcgccttggagtcggattttatccaggctacccggtaatcggacaggtggttgacgacgcaggtgaagtgcacgtctcgtccctgcgtcaccgtgtggttctccagcggctgcaggaactccggcgccggcgccgccaccggcatctcacctgttacaaaaacgctcagcaacgtcgccagccaacaggctagtttggtgggagatgagcacatgtgtacgcacagtcttttcacaaagcgcgcgaagaaaaacaaacttactgcacaacacagtcataagttcatgtcaaaagttcattcgcacccaaactgttcgcacagtccgaaaacatctcacttgccatagttcgttaccgttcagaaatccacgtggcgggaaaagcgcgggagaattacgagtttcgcgggaaaagttgcgcgtttccagacgaccatccctccttgcttggac

SEQ ID NO: 497 - DNA, 582 bp, Plutella xylostella
  misc_feature (1)..(582): lov; LOV_DROME
ctcggcgcgctcgtgctccgccagcccgcgcacctgcagcgactcgcccgcgcggatcaccgtgcccagctgctcctgcgccaccgacacctccccgcggtacatgaagtccaccaccgcctgcacctcccagccctggaagtccttgagcacgatgacggggtgcttgcacgggttctcgctgaagatgcggcggaacagcgggctgcaggcgcccagcagcaccttgtgcgcgcgcacgcggcgctcggcgcacaccagcgtcacgtccaccagcgtctccgcgtgcagcagcgcctcgaaggcgcgcagcaggtgcgcctggtggttgttccagcgcaggctgtagtgctcctcgccgcccgtctgcgtcttgtcgtccatggctgcgagtgacccgtccgtttatccgagacttgaccgccggcacatttcactgatagagtcgagttcacaaatccttttgtccgagttcgggttcactgttgcgaaagttagagtgtgatgtgagtgttacgttcgcggcactggcggtcgggagagtcgcgaggtcggcgcgtgcggagcggccggggcgaaggc

SEQ ID NO: 498 - DNA, 4000 bp, Plutella xylostella
  misc_feature (1)..(4000): jar; MYS9_DROME
atttggtaaagcgatattaactctgtacttgacaatataaggtacttataaggcactgcactggattaacttcaactctgtctaggtaggtaagaatacacatccaaaaatcttttatattgtacatgtacaatgtatacctaatgcctattcatataacacttcacacttgtaaacatggaatgctgataaaatactgtattatgttactcaaatactttgttataaacagtctcacaataggaatgtggcaaacaataatacatttaaattgaccatgtgaaaaccggaaggaaattaaataaataatccttaacaagttcattaatcacagtaaaaaaaaaacttcatctaattgctctaagttctactacataatgtagaattaacaagcattgtgggtgttgaaaagagcacttcatcacactgtgcttttatttgtacctaaagtgtatttaaatcgatgttcaatataagaatattaatgcatcaataatatatttttcctctagacaaaacaggaaacataattttattgtacatcatgttattgctacgtttcgttctatacccataaaatatattaaatctgtatagcacttacaaatttcatgctttgtttgaactacactaaaataattatctatttttattatgcatgtaaatactcctaacttttgttttttgtaggttttcattttaataaatattattatttaattacagatgtgtaactatttataatttattgcactgtaaaatcgcaggaacccttgaaggcacagtacattaagctctcgatttcatcacaactacaatataaatctacaatacaaggaaggtgttgtttcatcaacttctctataagaataatacataataatgtggctgccgtttgctactcaactacgaccaagcaagtcgaaggatattaaagtttcactgctggaatctagcgcttcctaagctcgggcggcacgtaggcggccccgccgtgggcggtccactcgcgttcgaactcgtgctccagtatctcggcgccgcgcttgcgcgtcagccccgtctcgtccaagctcagctcgcacatctgcatgtcgtccacgccagactgcagcagcacaggcgtcttgtcggggtgcagctccatctgcctcgccacgtactggccatcgaagtgcgcgtaccaccagccgcgccggcccgccggctccgtggtcgacgggcgtacgaaggggatgcggaagtagcggtgcctcgcgccgaggacgtcgcctttggccgtcatgcgcggggctttggcggcgtccatgatggactgcggcgcgcgctcctggtccgccatggtggtcttgcgcgcgttcttcgccttccacgcgtggtacaccttcagccgccggtggaactcgtggcggcacgcctctaacagctcgatgtcacacgacgtattgatcgtgtcccgtagctcggagtacttccacttggacaggtcgtacttctgcttgccctgcatcgcttgttgcatgcgcactcgttccgacctgttcaatttattttccccgttcactgagtccattgttgggaaactgcgtaactggggcggtgatccttcgacgtgtccatttgtctctttagccaagcgcactgccatttcgtgatctcttcgttcttgttctaacctctccctgtcctgctggtggtctcgctcggccgcctcgagctgcgcctgcagctgcagcgcttgctggcgttccttctcttgttgttgtaagcgttccgcctcttcggccttgcgacgcgcctccatttccgctttgagtcggcggtgctcctcgtcctgtctcctctgctcctgctcgcgccgcttggcctcctccgccgcgcgcatctccgcctccagcttgcgcaggcgctcctgttcctctctgttcttctggtcgaccatagatttctgtagtgacgtcatttgggcttcgatgtctttcgttaagttcgtgaagagagagtcgatctcaggcgggctgatctttgcgttactcttaatagcagcgcaagcggcccttatcgaattcctcagattgacaatattcttctgcgccgcctccctaccatccttcagttggccggtgacctgctccatctgtcccagattgttctccaaggcgcgtatcttggcgatgcctcgcagcctcggtcggtgttgtttgcggactctgtacccgcggtacgccgtttgaatcttgatcaggcactcgcgccggtacaggattttgttctttagtttaataatagaaagcgcggcgaagatgctcttcctccaccgggacttgaccagccaggccagcacggagtccacgatggccttcaggctctccgggtcgctcctcatgatggcatcgaactcagagtactttcccgggcggaagaagactcgcgtcacgccgaatttatagtccttgtcggagagcttgaaactgtgcagcaccgcctcacaaaacgtcctagcattcaacttatgcagcttcggtggcagatacgacttgtacatctggtgcaggtcgtggaagggcgcgcgcgacgggtagccgtgctccatcagctccagcacggcgatggttccagaacattccagttgcgtcagcacgaggcccggctcgagggacgcgcccaccatgcgcgagttgggcttgatgcagcggatgaagtttgtgccattctgcttcaacttgtccatgagctgcgtcagctgcgtctggaacttggatcccacggagatgaagttgagtttccccttcgcgttgttattgtcactcgtctggaacaactgctggactagcgcgctgctcgactcttggactaaaaactctagcgaggcgtgcagggcgtcgttgttcttctctatgaattggttagtgttgtagcagacggcgcccgcgaagtgccgcagcaagaatccttcatcgtcgcggagagtacggtgcgccttcaggcgggacgcgcgaggtaactgtagtctggagttagttccgccgagttgcttgtgcacggagtgagtgaagtgtccaaactcaggtttgggcagcttcgactcttcatccagcagttggaagatgccatggcttttgctttcaattaaatctatacagtcctggttgtcggtgaaccggatctcgggcacgtgcagcccctccctcttgtacagctcctgctcgttcttaaggatgcgctcgttgaagaactgctgcagcttctcgttgcagtagttgatgcagaactgctcgaagctgttcatttggaagtattcaaagccagcaatgtccagcactcctatatagtaggcggaggcctggaaggggatgctggcgttgatgcggtgcacgatgtggtcgaacagccggctgtacaccgccttggcgagcgcgtcgcgcgcgttgcacgcctcgtacatctttagcggcaccataatagcagtccccttcatgccacccctcgaactctgcatcaatctcgacaccagtgacattctcaactctccactatccacgcccagtaacccagctgccgtggccatagtgccttcactgctgggcttcacatggcatccgccgcgggtgtctgacgggtcttcctcaaactcaatgttgccgaggtgtaagaccgctgccactattgagtagacggaggtcttttctgcttcggagaggccgacgcgggataatgcctggtgcagcctcgcgaagtccccggcgtcgtccagcacggggtcgcgcaggccgccccgcgcgcgatgctgctggctctgctggtgagcctgcagctggtgagccgactctgcgcgagtgaagtattgcgtgcagccgttcttgaggtactgaaagtcatcaggcttcgtaatcttgagtcgggctcgcagctccggcggtgcgcccgcgcagagcaagtaaaacacgtggtagttacgctcttctgcgctctgggtgcagatgcgggacttctccagtag

SEQ ID NO: 499 - DNA, 1479 bp, Plutella xylostella
  misc_feature (1)..(1479): Clk; CLOCK_DROME
ggggcgggcggcggctcggccactgacagctcgcacgactcgtcctgtttcagctcctccgactcggatatctctgcatagctgacgacctgatgcgtgcagaccacgaactcgggcttggagttccactggtggtaggtgatgtagtaacgcgtgcgcagccagatccactgctgccccttcgtgaggaagcggtagcggcacgacgtcagctcgcccttctgcatcaaagcctcatgacacgacaccaccttctccagatcatcaaagtggtagtaatcatagccggacgtgcccagcacctcaaacggcaggtagccgatgatgggcgaggcgcggtggtcaaggaacaggaacttccactcgaggctgtggcgagaggtaaactcgtttcgagccgagtcgactagtgacacgtctcggatgaggtgaggggagcgcagccgccccgtgcacaccaggatcaccttggtttcctcgtgttcaggctgcaggaagctcggtcggtcctcgccctcgtggtccgtagatgttcggaagtgtccgcagaagtcgacggtctcgtaggagcggtcaccgcgggggtcgggcgcgccgcgccggatatggcagtggaaccggatgtcgctgtctttgacgtgccccaccctggcggggtccacggactggagcagcgcgtacagccgcggccggtcctcctcgtgcgccagctcgaagatgctctggttcatcatgtccgacgggttgtgccccagcagcgcggcgacactctccgaggcgtagtgcacgcggccgttggcggacagcacgagcaggaacccctcgagagcctccagcaccaagtatgagaactcctcattggacaggaacggtggcttccagtcctccgtcacgtcgtgcgcgcgcgaacgcaccgttatgtcattgtggttcttgaggaaggagatggtggacttgagcacagtgctcttgtccattttgcggttgttggtggagatcatggcgctgagctcgttcaccagcagattgaactggtcccgccgcttcttctcgctgaggttgcgggtcctcctcttagagtcatctttatcatcgccgtcgtcgtccattctgtacgacgtttttgctaactttgaacaatatattaaagcttaagttgaatgcacgtcacacaacacttgtaaatatacaatcgcaaaacgtgttgcaattttttgaaagtagttcaacatcataggaattactttgtgattatcgagtaaaattaaatggttttggtagcactatgttgcgggtaaattccacactctcaactccgttggaccgcacggatatcactggaatacggtagaagcgcagttatatagtttcattgttttgttagagcacttctaatgcaaaaggtatgaaatttgcagatattcctcgtatcctttttaattttacagtgcgtgataccaacgaaaacatgaaagcaag

SEQ ID NO: 500 - DNA, 1643 bp, Plutella xylostella
  misc_feature (1)..(1643): lap; PICAL_DROME
gaagatataaaactgtaaactataacatgtgaaaaatatgtttgaaaaccaagttattatttctgcccaatctgtcttcatatttacacattttcagtattgcggaaagttgctttactaaatcacaagaaagaaattacgacaacccattcgtagcaatttctttccacaaaatcccaaaccaactttcctcaacacacccaacatcaataactcccaaaaccactcaccccctccaaacatgtcagcgaaggggttgcccagcgacagcaggtcctcgctggccttgctgttgttcgtctgttccgtagccggggccggcccgaacaggtccacgatagactggttctgattctgtgtgggctgcgcgaggaatgggttgttggctgccgcgtttgttggcgattgcactttgttcttatactggttaatgacggcctcctcctctctcagagcgtgttgcttcaacgtatcatcaataagcagcgccccacccggcatgttggtggcgcacgcctgcccgaaggatgatgaagttgacgatagggctcccatgacgctcgctactgatttctgggccgtggcggtggtggtgggcgtgccggccgcggagcgcttgccctcgagcgtggcgaggtgtccctccaaagcgtccagaagagatgaaggcgctttcgtcaggtccgggatgtctcctttgtctatgcccacgttttctgccaccttcaaaaactcccccactcggtccatgcgtatgaggaacttcttgtacaggtcgagcgcgtcccggcagttcttcttgttcatgtcgaagtacttctccagcaggttgatgatgccgtcgttgtagcacgcgaacagtctaatgagatctctgaacagcagcatgaagcacatattaatgacactgttggtgaggtcgttggccgtgcagtcgaactccagcaggctgtccaactgagcttggagcacaggaagcgtcttgaggagcttttcagcgttcatcatgcgtagcgagccttcttctttgccccgtttcactttgcagaagtcgaaggcgacggtgcggtacgacagcgacttctcgttcaggtacttggcgtagcgccggatgaacggggacatgtcgtagccaatccgagcgccggcagcgccttgcgctccacttttgtctaggaaattgcttagctgaaacgttgaattgctggacgctaagtattgtgtgaacctctcattcccataagccagcagatggtgcacggtgatcagtgacttgtagaccaccacccagttggtgttctgtgtgcgctccaccagcaggttggctagttgcgggatggagacattcggctcgtttgtacagtggactagataatctaaatgtttcttttttggtgcaatcatttcttcggtggtggctttgcatactgatttggctagaccctggccggcgatactgtgtcgcgcggccagtagcctatcatttatagtctgtcctgccatcatcatgattgaagccgtatatttagatctgttggcacttaaaaattacactttttcgctaacaattcacaaaattatgacgatgactgctcgtaagtcaccgctccccaaccactagcaaaatactaaattcaagatgg

SEQ ID NO: 501 - DNA, 1276 bp, Plutella xylostella
  misc_feature (1)..(1276): Atu; ATU_DROME
aggagtagatcgccgcgcctgcggtggctttctgtccatgcttgtatttgttcttaatagcctgcagcgagacccctccctcgtcatcgctgtcgtcccgcgccgccccgcgccccgcgcccctcgcccgcttcacccgcgcagtaccgcgggaccgcatcgccatgcggagctccatctcctctttcttaagctgatacttcctatccgcatcgggatcagcacccacttgcgacaatatcttaatagccgaagtcttggtcgaccggtcggctagcgacagagtcatcttgcggtgagtgaaggactcggtcgagtgcggtcggaaggagagcttggttctgaagacggcctggccttggagacccgtgccttggcggacgaagaggtggttgtggtcgccatgtagcggttgtttgtagacgtcgaatatctcggcgccgaggtgcagcgacatgctgccgtccgaccacttcaccatgcgcgcgttcgactccttgatagcggtgccgtctttctcgaacgccgttcgccaacgtatcgtgttctctaccttcagcttcagtctggcccgtccctcctcatccagcgtctcctcctcatcgatctcatcctcataagtattagcatcataaggccgggtctccaccgacaggaagttgggcaacttgacgaagtgcagctccttgcccagctccgtccagatcttgggcatgtccacgtcgatgcgggtctcgggtatttctacctcttcttcttcctcgggcttctgtttgttcgcctcatccccactgcctctaccctcgtcaccagatcttctgtcctcgtctgaccgctggccgctgcgcgagcgagagcgagaccgcgagcgcgaccgccgcggggaccccttgtcggagccggcctcgtcctccgtgctgatgtctgatgcgtcgccgaacagagcatccgctgtcacagtgtcatcaggtttctccccgtcctcatcatcagtatccacaatcttcatggccttcttgcgaggcttgtccgcatcagacccgctctcggagcccttcttgcgcttggaggctccggtggcctctgtatcactctcggagtcagatagcactgctcgtttcttcttgtctcctttagcttctgtttcagagctttttgatcttgatcgtgagcggctcttagatttagacttggacctagactttctggaaccggacctggatctgctcttagccttttcattggcttgttcatcatcaatcatcaggtttggtga

SEQ ID NO: 502 - DNA, 4000 bp, Plutella xylostella
  misc_feature (1)..(4000): LUBEL; LUBEL_DROME
gcgtatatcttacatctagtatgaagtgatcatttactcttattttactaacaaagtaataaataatgtacaaaatattcttctcggaagaggtaaagatgagacgattttcaaacgggatccgtgattcttcttgatacatgaagatgacttcagtccaaaggtattttctctctgacaatctcggccagggagcggcggtacagcccgtcgagcgagccgtagggccggggcggcgggcgcagcgccgcgcgccggaccagcgtctccaggtcatcgacccccagcacgggcagcgggtccacgcgcatgcgccgcaccagccgcgacaggtattccaggtagtggttcttgcatagtccggcgtgtttgggcggcacgtcggcgccgcacgtggtgtccacgagcccggccggcgtctcccgctgcagctgcacggggcacctcgagccgccgccctccgccgcctccgtcgagaactcgatgttgttcatctgcaacagcgtctgcagctcgtgcggctccttgtcccgcaggtagaacaggcagttccgggggtggtgcgcgtggaggcccagccgcgcgcagtactcgctgagcccgcagcgcgcgcccatcgtgaacggcttgccgcagccgtagcagaactcgtacttgcattgcgtgcacgtgaagtgcatgcagccgcccctagacagtgagtacttgaagtggcatcgaggacagtcaagcccgttctctctcagatgctgctgcaccgccgccaccgagcgctcggggtcattgtcctccagccaggcggcgtactgttcacatgacagaccctcgtggtttgatgtccacggtttccgacatttagcgcagctgaccgaccgacactcgggacaccgcagcttcttgtgcttcggatgcacaaagaacccggacgagcactctacacaccatctaaagttcggatccatagccagcgtgcgatctctcagcttcctctgaaacagttcatggacgtcgttgtctacgagggtcttgagctgtatgtcgaggtgtgagaagtactggagccactcgtcttctggaaggttctccagttctggttccttgcagtagggacacacacagtcggcgatgcttcgctcagtgatctgcacggtgtagtagtgacgcgcgcactcgcggcaacagcggtgcgtgcagcgcagcatcgataccatctcatgttcaggcagcttcgacgcacacagctcgcagtcctggttcagataggccatggcggcggcgaggtcgacgcactcgagtgcagccagcagcgcggcgggcggcgcggccccgcggcccaccagctccacggctagctgggcttgctgccatgtttctgtggctccggaggccagtagcatgcgggcttgacgctcaggtgatccttcgggcagccgtatagcagccaggtccacaacgaccccggacacccggcgcatggtgacgggcgggggcggcggcgcgggggtggggatttcatccgccgcctccaccgccgccggccgctcctgcgagccgtccgagtcgctgtccgtccattcgtcctccgtgcggcaagactcgcggaagtattgcttcttcttcttcttatcgtctttaggagacgatgtgcttggagaatctcgttttggatcagttggttgcactggcggcgctggcgcaggcttctttttagacatcgttgaagttgacgctttaacgtcgacttgaattgtggtttcgatctcgttcgttgggacgctaggtttcggtttgctgaacagtctggtttgcaactgtttgacggtcccgttttgaataccgccgaaggtggctttaggtggagcgggcgctgggtactgcttagtggagttgcgacgcacaggcactttggaagctattaccttaggtattcccttctcatttttatttttgttattcgtatttttgtttatcggtttcggaatacttgacttgttttgtgcgttagattttgtgcttggttcgttcccagtcttgttagtatttgtttgaacgttactgttttctttttcggctgttggtaaatcttgcgtagccgaagctaggttaactacttcactagtttctgttttgtgggcattattgatattattattactatcgctttgaacattatctgtattttcttctggctcattaatctgagtatctcttttgttatttacagtgttctctgtttcaacattaggtgtttccacttgttgtgaactatcaatactaattagttcagggatttccggactagtaggccgactattggtatttatttgatcttgactacgttcaccaatgtccaaattattgatgatcctgttcacagcttctatttgtgatattatttcgttattactttcattaattgacatggagtcatcactatcggtgccactggcgtcctcagtttcatcatcttcgataacgtcgatcgtagcgtttaaaacaggtgcatcgttttgagaaatgtgaagcctcgtcggcgggctgggtgtaaagacttgtaaagacatttcatgctcagtgacaattataattcgctctgtaacttgtactgctggttgatcaacttcggttctctgcatgggaacaggtgggcttattattctttcaggcgttttgtgcgaaataatttggccgctaataatattatcaggttgttcgttaacctttatttgtaaactttcagattgttgataattttcaggcatacttaattcatcatatatctcatcaaaggagttcacagccctaaaattgttattaaagtcctgtatcttctttgattggggcttggtaggaatagggatattcgtttccactgttatcgtttgttcttcttgtaaacttcttgcaatggaatctaaaacttcaaaattagattttttgaagtcttccatctgttcttctatgtgatccagcgcctcctcaaactgatcattttcttctgaactggttctgtttacttgtgtttttactacattcgactcttctacgatttcttcttcctcttcctcatcctcttcttctacagatgaactgtgttgttcctcggatgtgactccttcacttcgctctgtatcagtgtaagaagactcatgctccgaaaaatcctcattactgctctcgtcagatctactttcagaagtatttctatcttcagtagagtttatatcagagtttatttcatctttcatttgttgaataagtttttgggtgttatctacaatatcgctcagattattagatttttcttcgacttcatcagtactccttgtaggcttaggttcaatttttacattacttgagttttttaaacttaacggaatgtttttgggttgtgatatcgttttattatttgttggtttagctgatgatttttgaacactctttttaacttcttggcgtttatctttcgaagtcgtcttatttggtggattctgagcttcacttgaaactaaatcagtctttggcgtgttattcaagtctttgcttttcacattatcaataaccacattacttgcctggttatccacattatctatttgactaacagtgttaattacattttgtttcttatcgggcgctttgctattggaagctaaaggcagcgggcttaatctagttagagcgttgtaagcatctataaaatcattttcagattgtcccaagtctaagattgaatgtgaattatcctcaacacctgtatttttggcaactgggcgccttgcatcggcctgtctcctgttctctttgctcgttaatcctctcaacaaaagattttcgtctatatctggaatgcctgcttggtttagtagcatctttaacttataagcaatgtcttcgatattagtttccgatttgacggaggactctggggtccgatcgaccatgtcggggtacgtcgggctctcaagcggcatgaatatccaatcgtcttcaagttttc

SEQ ID NO: 503 - DNA, 3817 bp, Plutella xylostella
  misc_feature (1)..(3817): XNP; ATRX_DROME
gccgtgcgaggggcgggcggccgcgggggcggcccgtgctctcgcccagcatgatctctcgtgctcgcgcctgctgcatcgccatggctacggggtcgcggctgccgagcccgccggcgtagtattttgcgcccattgaattttgctgctgcatgagctgctgcagccgcagctggttctgctgctgctgctggcgctgccacggcggctcgtactgcagcccgctgctgccgcccatgcccgcgccgcccgccgttgcggtgcccttaccggcattcatgaacggacccatcatggggttggccatgcctggctgggcgtacttgtagatctcactcattttctgcatcaaagcggggttagcctggtagatgagcggcagcatgtcccggatctggttgtcgttgatgttgggcatgtccttgcgcagcatggccgatagcgccgcgtacgcgagctgctgctgctgctgagccattaggccggccgacatgccattagcgtgcatgggccacatgttggggaagggcgcgggcggcggccgcgtcttctcgttctcgaagtcctcccacgccgctttgcgttcttcttccgtcagggtctcttcttctttgttctcgaggagcgagtcgtgctcgtggtatttgtatatctgagtctcatgatccttcagcatctcagcaaacagccgatccttgggcagcggcggtatttccctcggctccgggggcctgggttcgaacttgtacagctcggcgaggtcattctccgcgtagtgtcggtcgatctgctgctcgtcgatcactcgcttggagatggcttgttttgtcacttggcgctcgtagattttctcttccattgttcccatagcaagaaaccggtatatgtagcagggcttcttctggccgaagcggtagacgcggaagatgctctgcacgtcgtgcgacgggttccacgacacgtcgaagatgaccacgcgattcgcggccaccaggttgatgccgagcccgcccgctcgtgtggatattaggaatagtctagcccgggggttgtcctccctgttaaagttcttgcaccagatggagcggttctcgcaggacgtggacccgtccagccggaagtagtccacgccgggggaccacgagccgacatggttgcctagtttctcgtcaatacgagcctcttgcgtcgcctcgtcgatcttcccgaggaaatgttctattaggtccagcgagtatagagattgtgagaacacgagcagcttgtccccgatggcctcgcactggcgcaggatctcgaacagcagcagcagcttgtgcgagttgcgcaggtcgtccagctcctcgtcgttcaccagcttgatccaccactccgtcgggttctcgttcttcacttcttctatgtcggagagcgctttctcttccgctgggtctagttccactgggttagcccttgtggcccgccttgtgttggccttgctgtcccgcttgttcttcttgctcgccttcttcttcttactcttcttgcggctgtcgtcgctcgcgtcggagaggtcgtccgacgactcctctgttgtcgattccggtggtgtagactcgtcgtctatgaagtcagccagcgacccctccgaatcttcttcctcttctttatctctcttcttctgctgcatgatctcgtaccgctcggagttgtacttgagcacgagcgggtgcgtccatatccgctgtagagactggaagtccgggaacaggaaccctgatgacttgcccgggagcggtctccgcgagtagttgtcgaggtagtgctggtacagcttggtctgtatgtcggtgagcgtgatgaacagcacgtactcgtgcttcggcggcaggaacggggctagtacgccgtagtctcgtctctgtacggccccgtccaacatcttatgcagcacgtgggagcgtcgcttcatgatgcggatgtcgtggtccgtcgagtccgtgtactgcccgttggtgatcgggttcacgaaccggttcagatactcgttgtatttgccgagcaggttcggcttcacgaattggaccatgcagtagtattctttaaggttattctgcagcggtgtcccagtgagcacgatgcgtcgcaacgtcttcactctgttcatggactgggatagagaagttttctcgttcttgagcagatgcccctcgtcgcacaccacgaggtctggacccgggtccacgaggctcctctggaaggtctgcagcatcttcttgcggtacttcttgctgttgtccgcggacaggttgcggaacatctcgtagccgagcacgcacacgccgccgttgtccagccactgttgcagctggaatgcacgttctgagttctgcttgaatctagacagctcatacacatcgacatcataatccgcgttggcgtgcttcagccacatgttgaactcgttgacccagttgagcacggtggacagcgggcacaccaccagcacgcgcttcacccccgtcagcttgccgtggaccagcagcgtgtgggttagcgataccacctgaagtgttttcccgagacccatgcagtgcgccaatatgcagccagatcctttatccttcttactacgtttcgcgctctcaaagcacgcatcccacatgaattttataccgttagcctggtgaggtttgagtttcttgacgagccccgggtcgacctgtatgagcggctccttggtctccgggtcgaagtccagcaccaccttgtctagaaccacctcgtctggcttgccggactcgtcgaattgaaggttgttgtacagtctctgccgctcggcaatacgcgccactcgctcgcgctcctcccgcgccgctttcttagtcgcctcttccagctggtccttgcccatcaccttgcgaatgttcttccttcctctcttctgtccctcggtctcggattcggatcccgacgcgtccgtgtcgtccacgtgcttgatgcggcgccgcttcttcttaccgacatcgtcagagccggcggaggcgtcgctatcgctgcccttcttcttcctcttgccgcgcttgcccggctccgagctctccgcgcccgagtcctcgaagtcactcagtttgacacccggatccttcttggacccgccttcagagtccgacgatatcgctggcgctttgcgacgcttcgattttacattttcttcgtctgctgattcatcatcatcctcttttttgttgtcctcagagctcttattctgtgagctggaagcgtcactttcgtccaataggtcgtctttagccaggtgttccatcgcgccgctgccattcaacccagtcacggtcactggtggcagctcttcagcgtcttcccccgcagactcctcagcagagctattgctattggcatccaacataacgtcctcagcaatggcgggtgctttaggcaggcgggcgccgcgcgtgcgtggtcgttcctctcggctggttgaactcgagtctttgcggcgtcgtggcgctagcgttttcaggtttgtcagcccatcaatatctttgtcagtttcttgtgtatcagaattttggctgctactggcattaggtttcaccttagagcggcccatctttcatgtaaattgctggaccagcccgtatacgcttcttcctgaagtgaacgcacttaactttgataacaagacattctaaatattgagaaattatctaaaaactgtaaagtatgctcatattccaattctaatccgaaaaatcggcgaaataagctaggtaggcaaactatccaaaacagtcgtgaaaaaaaccatagattttct

SEQ ID NO: 504 - DNA, 768 bp, Plutella xylostella
  misc_feature (1)..(768): Wnt4; WNT4_DROME
cccaccaacacatcctgcttcaaagtatccgctatttggtcgttcccggcatgcttgaagtctagaaagttccgtgtgatccgcttcccatacctgaagtcgtctccgcagccagctgtcttccattctttgacagtgttctttccaaagctgttcaaacatgaacatttgacgagcgatcccgaggcgcatcctttagcgaccgcgtgcgatagagaggcggctgtcaacgcaaaaacaaatgcggtttccctgtagattttattgaagatgttccttttaggtttgttgttgaacactaatgagcagttccacttgtcgtatctaaaggcgtcctcgcaagaagagatggcttggttcttcgctatgtcgatagtttcctccaggccagggtcacggtggcagatcttggtctgccgaggggacgagcgcaaccatttgcaagcgtcggggtagactgtctcggatcggtcggagaatagagattcgatcgttctttgaaggactgggcgagatccttcaacgatttccgacgaaattaaagtgagagtcgatagagctatagcgaacgacactgaactagaacctaacataatgaaggctatgaaataaaactattccatgttgaaagttattgtttcacaaaacttaatattgcagagcgtgggcctaacatggtgaaacacattgctctaatggtcaagttatggataagacaaagtgagataagttaatcagaaaagggttgggtcagtcctaaaaaggaaa

SEQ ID NO: 505 - DNA, 1255 bp, Plutella xylostella
  misc_feature (1)..(1255): Wdr24; WDR24_DROME
gggcgcggggcgcgggatggggcgcgcgggggcggccacggtcacctgcccccgtgcggacacgctggcccccgcccccgtgccccacagcaccgggtgagcggcttcttgccaccggtgccagtagagggaacagtcgcggctggtggacaggaaggcgtgcggcgaggcgcgccaggcgatggcggtggtgacgtcgcggtgctcggcgaaggtcgccagcggcacgtgcgggcgccgcacgtcccacacgtgcaccgcgcagtctagtactagcgcgcaggacgagatctggtatttccgctgcgggcgccacttgacgtgtcccacggaggcgatagtgtagatcgtgtgctccagagtaggcttggctgagatgtcccacaccttaatagtcttatcccggctagccgtcgccaaccacggcagctccggatgccagtcgcaggcgaacacgggccccgagtgcgcggtgaactgcgcctgcgctcgctccggccggcgcacgtcccacagctgcaccgacccgttctccgagaccgccgcgaactggtgcgcctggtgcggggagaactgcacgtcgcggaccgactccgtgttgctcatgaaagtcctggccacttctttcattctcaggtcgaagcatttcatggtgccatcctgagagccggagatcagcagcgccggctccgtcaggtggaaactcaccttgttgacagttctcttgtggtctgagaacacatgttcctgcttggacctcccggagcggccgaggttccacaccaccaccgcaccattggtggccgccgtcgctattgtgttctcttcaatatggctccaagcaacatcaatggaggaaaaattaagatttaagtttttcccaactcgtagattacaaacttctgtaaactcattttctccaatagagaacactttgaacacatttcgcccagctatgaccacttgcgagcagtccttgttgagtgcaagagcattggctggtccttcttgagacacacaaattgtattcgaaggaatcatcgtttatttattgtgtatgttcaatttacacttggatatacaaaacacttaacataatatttttcatagcaataagcataccggaaaaacaaccgcccaagcaatacttaattaaattgcaccggttacgaccacaactgcacttttacagagataaaatagaaataatatccacttcagtggctcgacttttgcccgaaattgttgttttgtt

SEQ ID NO: 506 - DNA, 873 bp, Plutella xylostella
  misc_feature (1)..(873): HSP70B2; HSP74_ANOAL
ggtaacggcgggctggttgtccgcgtaggtggtgaacgtctgcgactgcttgcacgggatcttggagttgcgctcgatgatcttcgtcatgactcctccggccgtctctatgcccagagacaggggagccacatccaccagtagcacatcttggattcgtgtgtcggtgttgccggtcaagatggcggcctgcacggcggctccgtaagccacggcctcgtcaggattgatggagaggttcagcttcttcccacagaagaagttttgcagcatggtctggatcttcgggatgcgagtcgagcctccgactagaacaacgtcgtcgatttgactcttgtctaatttagcgtctttgagagccttctcaacgggttctagggttcctcggaagagatccgcgttcagctcttcgaacctggcgcgggagaccctggtgtagtagtcgatgccgtcgaacagagcatctatctcgatggtagcctcagagcttgaggacagggtccgcttggcgcgctcggcggctgtccggagcctccttaacgcgcgggcattgcccgtcaggtccttgtggtacttcctcttgaactcctgcaccagatggttcacaagcctgttgtcgaagtcctctcccccgaggtgcgtgtctccggctgttgatttaacttcgaacagcgaaccttcgtcaatggaaagtatagacacatcaaacgtgccgcctcccaggtcgaagatgagaacattcctctcgcctttcaagttcttgtccaacccataggcgagagctgcggctgtgggctcgttgatgatcctcagcacgttgagacctgcgatggctcctgcgtccttggtagcctggcgctgggagtcgttgaa

SEQ ID NO: 507 - DNA, 1341 bp, Plutella xylostella
  misc_feature (1)..(1341): PAN1; PAN1_PICST
ccgcccatgcctccaggcatgccgcccattccgccaggcatgccgcccatacctccaggcatgccgcccatacctccaggcatgccgcccatacctccaggcatgccgcccatacctccaggcatgccacccattcctccgggcatgccaccggcgttgcctccattgttgccgcctccgtgcatcctagtcataatcggcgagcacactcgttgcaactctttcagcttgtgttcgtattcctcttggtcggcgaggttgttgttgtcgagccatttcagcgcttcgtcgcactcgttcttggctgtgctcttgtcctggtcgctgagcttgtcgcccgcctcgtccacggcttgcttcacgctgaagatgtaggcttcgagctggttccgcgcggcgatgcgcttcatctgcttctcatcttcactcttgtagcgctccgcgtcggccaacattctgtcgatctctgcctgcgacagccgccctctgtcgttcttgatgacgatgttcttgctgcgaccggaactgttgtctttggctgacacgttgaggattccgttggcgtccatgtcgaaggtcacgtcgatcttcggcactcctcgcggcgccggcgggatcccggtcaagtcgaatgttcccagaaggttattgtctttggtcagtgctcgttcgccctcaaacacttggatggtcaccgctggctggttgtccgagtaggtggtgaaggtctgcgattgtttgcagggtatctttgagtttcgttcgatgatctttgtcatgactcctccggctgtttctattccaagagacaggggagccacgtcgaccagcagcacgtcctggatcctggtgtcggtggatccagtcaagatagccgcctggacagccgcaccgtaggccacggcctcgtcagggttgatggaaaggttcagctgcttcccacagaagaaattctgcagcatattttgaattttcgggatgcgcgtcgaacctccgaccaatacgacatcgtggatttggctcttgtcaagtttagcgtctttgagagccttctcgacgggttccagggtgccgcggaacagatctgcgttgagttcctcgaacctggctcgggagacgcgcgagtagtagtctatgccctcgtacaacgcgtcgatttcaatggtggcttcggtgcttgacgagagggtccgcttggcgcgctcggccgcggtcctgaggcggcgcagcgcgcgcgagttgcccgtcaggtccttgtggtacttcctcttgaactcctgcaccaaatggttcacgagtcggttgtcgaagtcctcgcctccgaggtgcgtgtctccggct

SEQ ID NO: 508 - DNA, 1522 bp, Plutella xylostella
  misc_feature (1)..(1522): Aplip1; JIP1_DROME
gtctcggctggtacatagtaatattcaagctaataaaaaaaatgcaaagaaaagatgagtaaacagattatgactgctaattattaatattaataataaaatttacatggtgttggcgacatgacaacgacaacaagttttaagaaatattgagtttttttgtgaggtagcaagcctagttgaattagttgcttatttattcaatgtagatgtcttcaattggatacgccgtctcaataaatttctggtaaaacctttggaaagcacgcccgactgcttcagccactggcctagtagactctgagcccctaaacacgtgacatgcaaatcgctggagcgttgggtgtttcgttatgaagcccagataccgatggtcgcgtggatggaacgcacagaaagaaacgttcttcagcgaatagaaatagtcaatacagggaccgttccgtgctctctccgattttgacctatcaaccatacggagtccttgatcagatacttctaaaatacatggttgcgctcctggctctccgctgttatcacctactattttctttactgcttggcaaactactccagtacctttatgggccagagtctcgactgagcccatatatcctaatagatatcgttccctttttactttggagtttgccggatcgaaatcgttgtagtccatatcaactgcatacgctgatggaaatataccttgttgtcccgttctcaaattaacgccttcgcaccataagtcttctgcttccttctgtacatagattgggtcacctatctccacttctatctcatcgtggtgtcgggggttgaacttgtgtaggcctcgatgcgtcgcctccaacatctcaaggtgactatgaggaaccgttgtcatgttaccggcaaagtttatgccactgatgctgcagctcgataatggtgatacattttgttgttgcattggagtgggtgaaaggctcttaggagccgtgtctacgggtgagtgagccgtactgtgtccgctatctacatcgcctaagctctgcaaccgctcagagtctggactggaatcttcatccagcagatatccacatttgagaaccagcaagggcctcccttggcaccctggtctgataatgggtccagccaacgctccaagttcatctgctaacgaggccggttggccgcatggtattattgtggattttctatttttaggtatttctggtagctttctcctcctgcgttcgccatttgtaaatgtctgatttcgggggctacggggtagttcggttatttctgtttggggatcgggggatgtatctttggtgttaactgcgcttattgtatcccctctttcacccacacatttttggtcatcctcaggcgtactttcactcttcgatgatggagagtcatcttccagaccaacatttggcactaatgaataaaagggtgtcggggcctttatgtgttgtggtagtctgtcaaatgctcggcgaaattcttcaaactcgctgtcggccatgtcgct

SEQ ID NO: 509 - DNA, 403 bp, Plutella xylostella
  misc_feature (1)..(403): Taf5; TAF5_MOUSE
tcatgtatttaaattttaaaataaacttacacataatattaggtatatcttaaataactacgagcttccttcatacgtgccgactgctaatagcagattacgtctagtgaaatgcaggctggtgacgggagagttcttggtggcgaatgatctcaagagtagtttctcttccttctgcgccgtcgtgggggctccgaccggctcttcggccgtactctcatcggtagctagagcgaagtcccacagcttgattgtgttatccagtgatcctgaagcaagcacagtcccgtcgcgactaaacgctagcgcatgcgcgggcgcggcgtgcgcgggcggcaggaccacggcgggcgcgccgctggcgaggtcccacacgcgcacctccccgccccccgcgccgccg

SEQ ID NO: 510 - DNA, 508 bp, Plutella xylostella
  misc_feature (1)..(508): hb; HUNB_MANSE
cggggacacggagcgcgcgtcgctgagccgctcgcggtacgccaggcgctgctgcagcagggacggcggcgggctgcccgcgacctgcttttctgcttcgggcttcggtgacgttttgggctcgtaattgttgttcgggggaaacaggaatgagtgttgtagaataggaggcaggtaggggaggttgatgggaaattggtttctaaacagtggatgtgtcggttgcggcggttggacttggttattgttcatgccgtgctgtggctggtcgtaggacttggagtgcattgacttctgcttcggcccgcggcgggtcccgtacacgtcaatgatcgggagcgggttgggcgtcccgtccatgttcagcaccatggcggggttgtgctggtacttgcgcaggtgcagtttcaacgagtggcagtacttggtggcgtagttgcagtccgcacagcggtactggtacacgttggagtgagacttcaggttagagttgagcatcgacttgttg

SEQ ID NO: 511 - DNA, 3467 bp, Plutella xylostella
  misc_feature (1)..(3467): Fur1; FUR11_DROME
aagaataattattggataacagttgtacttattcttaatacacgataacctcatttaaaattaactacatacgtacagggatggtccgaaaataatgtaagtgacaaattatttaattttttgtagtatcagagtaagggcgaagtcccgcacacataaaaaataccgtaatagataatgcaagttttttttatcggtacgttttgtgcaatttcagaacgtgcgcgtaatagactcattcaccccaataattatataagtaactaacagacacttactgtatccacggaatttaaaatttccaatcacatacaaaataaatgttttatacacagctcacacaaactgattgaactcacattcatattcagtcgggtcagactcaatttctgacaataccccatccaaacccttacaccaaatacatctacgtaatttaaaaatcaaatcgaatagcgtcgccgatcagtcactaacattacattagtcattaccttcggacgtacccttgaatcacaatagtaggtagaccctgttgcgtaagaatgcccctcatgcaagcaagaactaacaataatcagttgtgttataagtttagaaacgcgcactctcacgcaacagggtgttttgaccatagatactagagaaccgccaccggtttaggcgacctgttcaatggggttaagcatggcgctctggctggccttgaacacctcggggtacttaagctagcagttagttcacagtcgcgttttcttactttaaactgtggctgtctgcgttccgcgcccgccgctctgattggtcggctgcgcaacgcgtcggccatagatatgagaagcagtagaagtgacaaacctaggcagtggaggggagactgcggcgagtgtgtggagcagccggaagatgtggacgcttcgctctcggccgcttttgacaagccgctgtcacggaccgtgtgagtatcgtgccacactagcgccatgtcatcttcgatggcgttgtgtggaacttcttccaccttgggtcggctccacggcttggccttctcaggatttggctccaaagaattattttcttgtgacacactctcttcatgaggtggtgtttccgtcccatagaatattagctcccactgggtcagcggtccggcattcgcttggagcggcgcggggtatatcctttgtattttcgggtactgctcgaaaaggttcgacatcttgcgccctctcgcgtctgccagcggatccgccaggtcccctcgcaaattgaggctcaaatccgcagccgtcgacacgaccgtcttcgccgtcgtgctctcgagcggagaccgtgtcgccggccgtccttgcttcgacttctgtgagtttctattcgagtttttcgaattcttattcttctttcgcttcactagcccgacggagtaggtcgggactatgggtatgagctttccgcggctattcttccttccttgttgcaccatgacggggcgagtggcgttgcctttgttcctcacaatcggatttctgaacggaaccggatcgtttttcgcggccggcgtgcttgtgccgtgcagtattagagaccagtcttgcaacgtcgcccgacccatatatcgtccttcattggacacctcaagctgccagatgccgagcggggcctccccccacatgtggaccgacatgaagggccacgagttgaagccggcgcgggacgagtcgtgcgccctgggagccagcagcgtgacccgcgtgccggcgggcgaggtgagcgtgatgcgcaggtcgccgcgccgcgacgccgacagggacactcgcgcctgcacgtgctccaagtagttcacgcccggacacgcgcccacgtccagctgcagagtgacgtggctgcggggcggcacggcgcgctgcgggcgcggggcggccagctcgcacttccgctgcgccggcacggtccgccaggcgcgcgctagtcgcaccatcccgcacgcgtccagcagcccgtagccgaacgagtgcgacacgttgcgccccacgccgttcacgcgccactcgccgccggagctcaggcgctcgggccgcgccgtgcggaccacaatatgctgcatgtcccgccacgtcaggtccttattcgcttggagcgccagcgcgcagatgccggcggcgaggggggcggaggccgaggtgccggtgtgccccgccgtgcacgagtggtgcaggtctgtggtcaccacctgcttctcattaatagccccgctgctgtacgtagcagctagcgtagaactacacatctcagagtaccagggcacctcgcctcgctccgtggccgaggatatggacagcgtccagatggagttggtgtagccgtcacagttgcagttgtcgtactctcggccaccattgccggatgcccagacgaagatcgatcctttgccgttacgacccttagtgacaccctcgatgaacgccctagtcgccagttccccgggcccgtccaccgtcttcccgtcatcatcagggccccaggacgcgctgtagatgtccacgtgctgagggttcaggctgagcgagcgcgcctccaccgcgtccgtgacgtcaccgtccagcatgcggactcctccaacgctagccccataagccacgcccacagcacacagtgagttgttggcggtggcggcgacctcgcccgcgcagcgcgtgccgtgtctgttagagtcgatcatgtcgtagcgcggctgcgggtccgggtcgtgcgagttcacatcgtacgacgccattgggtcataattggcgacgaggtccggatggtcggtctcgagcccgtcgtccaggatggtgaccaccacgcccttgcccgtgacgccctcccgccacgccggcaccacgttcatgtccaggccgccgccgcggttcaaataccacatgtgttgccacttggggtcgttgaactggaacctggagtccgtggaccggggccgtcccttcacccggctgggctcccgcttgcccgtgtcccgcttcgacgctgatgacggccactcctcgcgggggtaggtctcagctgtagtagaaaaattgtacaaaggttggaagtcccgcttcttgcgagacagagcgcgctgctgcttcgcccatctcactctcgcgtcggctgcgagccggccgtggtgcgcgtgcgcaggcgacgccgagcggcgcgacacgcggctgtggtggaagtggaagtggttgtcgaatatctctccaagattgacgaacccatgttcgttggcgacggcgtcggccgcctccctcccgcccgggacgtgcacggcccacgtcggcgtgtagtgcgcccgcgcagccgccagcactgacagcagcagcaagatggcggcccgcgccatgacactcactgcactcaccggctagtacttgtcagcattgccactaacactttcttgtagcgaaggcttctgttcggttttgaag

SEQ ID NO: 512 - DNA, 393 bp, Plutella xylostella
  misc_feature (1)..(393): Sodium/potassium-transporting ATPase subunit alpha-B; AT1B_ARTSF
ttccatgctacactctgccctgtattacgtatgataaatatccatcgttgggcgttcgttgggccggtctgtacgcagctttagtagtaagtggtctcattgcaaattcccccgagcttgttgtttcttatgcagtactttctcaattcatcaaatgtcaataagaatactgaaaaaggtagcgataggaaccaccatctgaaatataagggatatgcattgaagaatgtgttaacgccgggaatgtaacagatacatatcgccaggcacagttcgaacaccaaccccacattcaaaacatgattcttcattccaatccggaacacagagttgtaccgggtccggcagacgactccattcatcatctgtgtaagcactatggccacgaagtag

SEQ ID NO: 513 - DNA, 384 bp, Plutella xylostella
  misc_feature (1)..(384): Lac; LACH_DROME
tatattatgttgttatcgtgaaatatcttgagccttaaataaataatttatctcagacttacaaagtatcaaatttacagccattatcagctgagaactgagaatgtttaaggattcttcgctaattataggtacctccgggtatactcacctgaaatcggttcatgattttgaacctaggtcagtattttgtggtatctccaataatattagctacatagaaacccattaaaatttaacaagttaaacttcaaaataaagtgagctccaaatagtcatgacagttccactaaggcaaggaataacatacagcacagacaaacagacaatcagactttagaacgtatagaagtatctgacgacaactaccaggagagcatagag

SEQ ID NO: 514 - DNA, 479 bp, Plutella xylostella
  misc_feature (1)..(479): lov; LOV_DROME
cgcggatcaccgtgcccagctgctcctgcgccaccgacacctccccgcggtacatgaagtccaccaccgcctgcacctcccagccctggaagtccttgagcacgatgacggggtgcttgcacgggttctcgctgaagatgcggcggaacagcgggctgcaggcgcccagcagcaccttgtgcgcgcgcacgcggcgctcggcgcacaccagcgtcacgtccaccagcgtctccgcgtgcagcagcgcctcgaaggcgcgcagcaggtgcgcctggtggttgttccagcgcaggctgtagtgctcctcgccgcccgtctgcgtcttgtcgtccatggctgcgagtgacccgtccgtttatccgagacttgaccgccggcacatttcactgatagagtcgagttcacaaatccttttgtccgagttcgggttcactgttgcgaaagttagagtgtgatgtgagtgttacgttcgcggcact

SEQ ID NO: 515 - skipped

SEQ ID NO: 516 - DNA, 430 bp, Plutella xylostella
  misc_feature (1)..(430): jar; MYS9_DROME
aatataaggtacttataaggcactgcactggattaacttcaactctgtctaggtaggtaagaatacacatccaaaaatcttttatattgtacatgtacaatgtatacctaatgcctattcatataacacttcacacttgtaaacatggaatgctgataaaatactgtattatgttactcaaatactttgttataaacagtctcacaataggaatgtggcaaacaataatacatttaaattgaccatgtgaaaaccggaaggaaattaaataaataatccttaacaagttcattaatcacagtaacttcatctaattgctctaagttctactacataatgtagaattaacaagcattgtgggtgttgaaaagagcacttcatcacactgtgcttttatttgtacctaaagtgtatttaaatcgatgttcaa

SEQ ID NO: 517 - DNA, 391 bp, Plutella xylostella
  misc_feature (1)..(391): Clk; CLOCK_DROME
tatcatcgccgtcgtcgtccattctgtacgacgtttttgctaactttgaacaatatattaaagcttaagttgaatgcacgtcacacaacacttgtaaatatacaatcgcaaaacgtgttgcaattttttgaaagtagttcaacatcataggaattactttgtgattatcgagtaaaattaaatggttttggtagcactatgttgcgggtaaattccacactctcaactccgttggaccgcacggatatcactggaatacggtagaagcgcagttatatagtttcattgttttgttagagcacttctaatgcaaaaggtatgaaatttgcagatattcctcgtatcctttttaattttacagtgcgtgataccaacgaaaacatgaaagcaa

SEQ ID NO: 518 - DNA, 234 bp, Plutella xylostella
  misc_feature (1)..(234): lap; PICAL_DROME
catgtgaaaaatatgtttgaaaaccaagttattatttctgcccaatctgtcttcatatttacacattttcagtattgcggaaagttgctttactaaatcacaagaaagaaattacgacaacccattcgtagcaatttctttccacaaaatcccaaaccaactttcctcaacacacccaacatcaataactcccaaaaccactcaccccctccaaacatgtcagcgaaggggttg

SEQ ID NO: 519 - DNA, 376 bp, Plutella xylostella
  misc_feature (1)..(376): Atu; ATU_DROME
ccggcctcgtcctccgtgctgatgtctgatgcgtcgccgaacagagcatccgctgtcacagtgtcatcaggtttctccccgtcctcatcatcagtatccacaatcttcatggccttcttgcgaggcttgtccgcatcagacccgctctcggagcccttcttgcgcttggaggctccggtggcctctgtatcactctcggagtcagatagcactgctcgtttcttcttgtctcctttagcttctgtttcagagctttttgatcttgatcgtgagcggctcttagatttagacttggacctagactttctggaaccggacctggatctgctcttagccttttcattggcttgttcatcatcaatcatcaggtttggtg

SEQ ID NO: 520 - DNA, 487 bp, Plutella xylostella
  misc_feature (1)..(487): LUBEL; LUBEL_DROME
gactccttcacttcgctctgtatcagtgtaagaagactcatgctccgaaaaatcctcattactgctctcgtcagatctactttcagaagtatttctatcttcagtagagtttatatcagagtttatttcatctttcatttgttgaataagtttttgggtgttatctacaatatcgctcagattattagatttttcttcgacttcatcagtactccttgtaggcttaggttcaatttttacattacttgagttttttaaacttaacggaatgtttttgggttgtgatatcgttttattatttgttggtttagctgatgatttttgaacactctttttaacttcttggcgtttatctttcgaagtcgtcttatttggtggattctgagcttcacttgaaactaaatcagtctttggcgtgttattcaagtctttgcttttcacattatcaataaccacattacttgcctggttatccacattatctatt

SEQ ID NO: 521 - DNA, 315 bp, Plutella xylostella
  misc_feature (1)..(315): XNP; ATRX_DROME
gtggcgctagcgttttcaggtttgtcagcccatcaatatctttgtcagtttcttgtgtatcagaattttggctgctactggcattaggtttcaccttagagcggcccatctttcatgtaaattgctggaccagcccgtatacgcttcttcctgaagtgaacgcacttaactttgataacaagacattctaaatattgagaaattatctaaaaactgtaaagtatgctcatattccaattctaatccgaaaaatcggcgaaataagctaggtaggcaaactatccaaaacagtcgtgaaaaaaaccatagattttc

SEQ ID NO: 522 - DNA, 310 bp, Plutella xylostella
  misc_feature (1)..(310): Wnt4; WNT4_DROME
ctgtctcggatcggtcggagaatagagattcgatcgttctttgaaggactgggcgagatccttcaacgatttccgacgaaattaaagtgagagtcgatagagctatagcgaacgacactgaactagaacctaacataatgaaggctatgaaataaaactattccatgttgaaagttattgtttcacaaaacttaatattgcagagcgtgggcctaacatggtgaaacacattgctctaatggtcaagttatggataagacaaagtgagataagttaatcagaaaagggttgggtcagtcctaaaaaggaa

SEQ ID NO: 523 - DNA, 454 bp, Plutella xylostella
  misc_feature (1)..(454): Wdr24; WDR24_DROME
tggccgccgtcgctattgtgttctcttcaatatggctccaagcaacatcaatggaggaaaaattaagatttaagtttttcccaactcgtagattacaaacttctgtaaactcattttctccaatagagaacactttgaacacatttcgcccagctatgaccacttgcgagcagtccttgttgagtgcaagagcattggctggtccttcttgagacacacaaattgtattcgaaggaatcatcgtttatttattgtgtatgttcaatttacacttggatatacaaaacacttaacataatatttttcatagcaataagcataccggaaaaacaaccgcccaagcaatacttaattaaattgcaccggttacgaccacaactgcacttttacagagataaaatagaaataatatccacttcagtggctcgacttttgcccgaaattgttgttttgt

SEQ ID NO: 524 - DNA, 486 bp, Plutella xylostella
  misc_feature (1)..(486): HSP70B2; HSP74_ANOAL
atgcgagtcgagcctccgactagaacaacgtcgtcgatttgactcttgtctaatttagcgtctttgagagccttctcaacgggttctagggttcctcggaagagatccgcgttcagctcttcgaacctggcgcgggagaccctggtgtagtagtcgatgccgtcgaacagagcatctatctcgatggtagcctcagagcttgaggacagggtccgcttggcgcgctcggcggctgtccggagcctccttaacgcgcgggcattgcccgtcaggtccttgtggtacttcctcttgaactcctgcaccagatggttcacaagcctgttgtcgaagtcctctcccccgaggtgcgtgtctccggctgttgatttaacttcgaacagcgaaccttcgtcaatggaaagtatagacacatcaaacgtgccgcctcccaggtcgaagatgagaacattcctctcgcctttcaagttcttgtccaacccatag

SEQ ID NO: 525 - DNA, 450 bp, Plutella xylostella
  misc_feature (1)..(450): PAN1; PAN1_PICST
cggcgggatcccggtcaagtcgaatgttcccagaaggttattgtctttggtcagtgctcgttcgccctcaaacacttggatggtcaccgctggctggttgtccgagtaggtggtgaaggtctgcgattgtttgcagggtatctttgagtttcgttcgatgatctttgtcatgactcctccggctgtttctattccaagagacaggggagccacgtcgaccagcagcacgtcctggatcctggtgtcggtggatccagtcaagatagccgcctggacagccgcaccgtaggccacggcctcgtcagggttgatggaaaggttcagctgcttcccacagaagaaattctgcagcatattttgaattttcgggatgcgcgtcgaacctccgaccaatacgacatcgtggatttggctcttgtcaagtttagcgtctttgagagccttctcgac

SEQ ID NO: 526 - DNA, 468 bp, Plutella xylostella
  misc_feature (1)..(468): Aplip1; JIP1_DROME
gtctcggctggtacatagtaatattcaagctaattgcaaagaaaagatgagtaaacagattatgactgctaattattaatattaataataaaatttacatggtgttggcgacatgacaacgacaacaagttttaagaaatattgagtttttttgtgaggtagcaagcctagttgaattagttgcttatttattcaatgtagatgtcttcaattggatacgccgtctcaataaatttctggtaaaacctttggaaagcacgcccgactgcttcagccactggcctagtagactctgagcccctaaacacgtgacatgcaaatcgctggagcgttgggtgtttcgttatgaagcccagataccgatggtcgcgtggatggaacgcacagaaagaaacgttcttcagcgaatagaaatagtcaatacagggaccgttccgtgctctctccgattttgacctatcaaccata

SEQ ID NO: 527 - DNA, 281 bp, Plutella xylostella
  misc_feature (1)..(281): Taf5; TAF5_MOUSE
cttacacataatattaggtatatcttaaataactacgagcttccttcatacgtgccgactgctaatagcagattacgtctagtgaaatgcaggctggtgacgggagagttcttggtggcgaatgatctcaagagtagtttctcttccttctgcgccgtcgtgggggctccgaccggctcttcggccgtactctcatcggtagctagagcgaagtcccacagcttgattgtgttatccagtgatcctgaagcaagcacagtcccgtcgcgactaaacgctag

SEQ ID NO: 528 - DNA, 434 bp, Plutella xylostella
  misc_feature (1)..(434): hb; HUNB_MANSE
ctgcccgcgacctgcttttctgcttcgggcttcggtgacgttttgggctcgtaattgttgttcgggggaaacaggaatgagtgttgtagaataggaggcaggtaggggaggttgatgggaaattggtttctaaacagtggatgtgtcggttgcggcggttggacttggttattgttcatgccgtgctgtggctggtcgtaggacttggagtgcattgacttctgcttcggcccgcggcgggtcccgtacacgtcaatgatcgggagcgggttgggcgtcccgtccatgttcagcaccatggcggggttgtgctggtacttgcgcaggtgcagtttcaacgagtggcagtacttggtggcgtagttgcagtccgcacagcggtactggtacacgttggagtgagacttcaggttagagttgagcatcgacttgtt

SEQ ID NO: 529 - DNA, 477 bp, Plutella xylostella
  misc_feature (1)..(477): Fur1; FUR11_DROME
attggataacagttgtacttattcttaatacacgataacctcatttaaaattaactacatacgtacagggatggtccgaaaataatgtaagtgacaaattatttaattttttgtagtatcagagtaagggcgaagtcccgcacacataaaaaataccgtaatagataatgcaagatcggtacgttttgtgcaatttcagaacgtgcgcgtaatagactcattcaccccaataattatataagtaactaacagacacttactgtatccacggaatttaaaatttccaatcacatacaaaataaatgttttatacacagctcacacaaactgattgaactcacattcatattcagtcgggtcagactcaatttctgacaataccccatccaaacccttacaccaaatacatctacgtaatttaaaaatcaaatcgaatagcgtcgccgatcagtcactaacattacattagtcattacc

SEQ ID NO: 530 - DNA, 768 bp, Plutella xylostella; identical to SEQ ID NO: 504
  misc_feature (1)..(768): Protein Wnt-4; WNT4_DROME

SEQ ID NO: 531 - DNA, 4000 bp, Plutella xylostella
  misc_feature (1)..(4000): Protein dachsous; DS_DROME
cacttgaataaatattcctaatatcaatacttagagcgagacagtcacatatttacacctagcatagaacgtatttataatcttagagtcgaatgcgcagattttctgttagcaggaataggcggtaagccagggccgaccaacggcgacattgagggcgatctagtcgctaaaggtgatagagaaggggagaaagacggtgacatggcagccgccgcagagaagcctcctggcacatcgtggcttataggagaccgaggaagtaagtgctgtggttgccgacacgacaacgaaggagctggacagctccgaggtgccactgttgtaagtaatggcggaggaacactcttgcccccaggtaaagatgtccccttacttttagcgctagatgcagcactgttggcactttgaagtgatacagcgtcatctttcagtcgggctatttcagaaaatacatgggctaagggttggtattgtggaccccaatctaataagtaatcccagttgtagctacccgttagttcctcttctgaatgtacaattgaacttaaactacctgtcatggacggaccctgcgtcgggactgctgtgttctccccaggagcacttgggaatgctcctaatgccatggctctatcgactgctgcactggcctcgtctgcgctactcgcccgctcactgcccgtcacttcatttaattttgcataaattaggttagtaatatcgttttcatgtgccgcgtcttcgtcgaacatgtgaataggatctatagtgccatgatgaagaataggatctttgttagttacattttctgaacatcttcttgatgacgtagaggcccctccaccggcccctgtgtcaacaataccgagcctcgctaagtattcctgagtattgtgaactgaaacatcggacagattatcatcttcaacaccgttgttctgacgatgcaatgaatctctctgtagcgggccctcgtttatcatcctgatttcttcatcttcgccatcttccccgtcctccgcagatcctctgccacttgaacctgactgatctgagccagagagttcagaggttgtggctgctccagagttggagctcgcagtgtgcggtccgtacggtgggatttcatcatatcgaggtggagcaaactgacttgcacccggagcagtatttcttataggtattgtgtcgaaagcgcttggatctacgtaactatttgtggctccaactccttcagaattcaaaccaggtttattgactttcttatgcctcttgtttttcatgtgaaggaataagaatgcagcagcaaatattataataatgaatataaaacatattagcagtcccagggcccagtctgaaaggcctccatttgcagctacagcggcgtttccttctggtggtacttccactataactcccagaggatctaaagatatttctactgcagtcttatttgttaaagatccttgccttcctgaactcgctgtaatcaccaggcttatagatttatcgtaaccaaatagagtttcaacactatctgcctttttctttacaattataacgccagttgttctatttattttgaaatacgagtgcgaagttgacagctggtaaactattcttccatcgattcccttgtctcggtcagtggctgtgactcgacctatcgtataacctgatggtaatgctccggtttttggcacagggaagttataggtcttttgcgtaaattgaggataaaattcatcacgactttcaatatcaattcttactttcactgttgagcttttgccgccaatatccgaagctttaatagaaaattcgtatttgttcttctgttcataatcaaacacagcgtttgtatttactaagccagaacttgaatcaatttggaacattttccaagaatcgtcgttcctattgtgtgacgacgatgaaatagtataatttagttttccatagcgtccccggtctagatcagtagctcttgctgtaaatacagatgttccaactctttcattttccgcaatggtttcaaaatactcagttacagggaatgttggagtgttgtcattttcatcaattatttccagttttatgtaagctgcattgcacaatgcgggcaatccttgatcacaagctataattataagtttatattgtgtattacatgtgtcgtaatctagtgttttattgacagtaattacacctgttcgtggttctatgtaaaacagtcccttatcatctccagatgtaatattgtacgtgattgcagagttcggtgttccatacaaatcagcatctgttgctgacatttgaattaatgtgtagccgattttgacatcttcactcactgttagttcaaagtcttttgataagaacactggtgcattatcgttggaatcagccactgttacgaatatggtaattgatgttttgttctggttgtacgatagaacttttccctgctccacggcagctagtcccagaacgaaggaatcttgcgtctctctgtctaatttcttgaccagtagaagagcaccgtctgaagaaacatcgaaagactccgcttcatttcccgatattatgtgaaattcgagattgtactttttcacgatgtcgttaatgcctccgatctgaagaagtgaagatcccttttccatgtcttcgttcaccgtgattctgtaagtatcctgcccaataaacggcttgatctcagacgaagcgccggcgctgatcttgacggccgccaccgcactccggttcagcttcccgtggtccgtcgccaccacggccagttgcgtgtctctgtgcttttctggcaaggaactgtagttcacgtagatgacgccagaggtcgcgtcgatgaagtaacccttgactgggtgcaagagggagaaactgatctttccgttgtcttcgctgtctttgtctttcgcgctgagggaaccgatctcctggacaccgctgccttcaggcaaaactctgtaatatgaattctcatcaaattcaggagcgtggtcgtttacatcagttactttaacagtaagggttgtttgtgcgatgtgctcgctgtccgaagcagtcacattgatgtgataaatagtctcactttcataatctaatggactgtttagtacaacttttccactgtagcggtcgatggaaaacttgtcatctccttttgttataatgtactggagcgcaggataagtatcgacgtcattggcagtaaccgaaatcagtacagtcccgactgcagtgccttcagatactgaaatcacatttggtgggggaaatgtgggctggttatcattaatatcgacaacattaattcgtagtgtagctgttccagtcatttgtgggtcaccttcatcagtcgcaatcactgttaatttgtaggtttccctgatttctctatccagcactatgtttgtcttcacagatccggaaaaagccggctcaattatgaaggcgttatcgtggttaccatctacaatgtggtataagatcctggcgtttgcaccttggtcgctgtccttagcagacagctgcacaacaaattcccctttggtatttccttcgaggacgtttgcaatatattgctgttgcgtaaatcggggagcgttgtcattctggtccaaaagatttacagtaatttcactgtatccgtataaaacaggagatccttctgttcgagccacgacaacgaattttcttttgggtcccgggaaagattcgtagtcaagatttgccgaattgttgactcgaataacgcctgtattggaatcgatgtcgaaagcgtactgatcgtttccacttccaaactcataaattattctttgtcgccttccatcacttcttactgctgttacttgcataacttctttcccatagtgaaggttctcgggtatagatatattgtatgtagcgttttggaagtgaagcataggtgtttggtcggaaaagtcaccaactcttatttctataagtc

SEQ ID NO: 532 - DNA, 2625 bp, Plutella xylostella
  misc_feature (1)..(2625): CycE; CCNE_DROME
aaatattatcaaaagaaatacctggtattggaatgtgtttcatttcaataaaattgcatctaaattgtctaaaatatgcattatatcgatgctttgtagtaattaggaacactttaattattatttaacaaatataacactagcaaaacttcttgctttgtagataaacaatgtcagcgggttaataaaacatttaattcttaccaaaaattatggtgttcagcaatggatgtcttcggaatttaaaacagatccatttaatatttctatgtacaattaaattttaactgggcctaatatttggaagtcaatgttggatacggtatttgagaatgcatgtcgatgatagccatattatcgcgagattcgcatgcactgaagcataagcaaaaatacctatacgtatgtacagaactacaataatatacagctcttggaagactaatcgaatcattgagacaccttaaataaattgaagggtaagtttcatgcaaaaacgcgcatttagtagtatttagtgagttacaaagcgagaccacacagttagaaataatcactcaagtccggttagtagtatccctaaggtgtcaatgttgtacggctcttaacttacctggctatcttaactacacacgaagagttcatcttaaaaatatttgggtgggaattacggtattaaaaaaatcctatgtaacctaatacttcctgtgtaagtcatcctgtttagcaaacttagatacaatctcaacttcagacaatatacgccaaaaagaacatatccaacattaacctccttgctaacctaacctcactcgacgtgcacgtgtaatctgacctctgcgacgatttgatgcctagtggatggagtctttgtggagggtgtcttggggctcttctggtcggaggcgggcggcgtcggcgggaacaggtgctcctgggaggtgcctggcgttgcgtccgtctgagactgcgactgctccaggaagtattggtatactttatcaaacatatccaaactgacattgtgcgactgtatcctatgactttcatctacattgaggtcgggacagatgagctgcaggccgccggcgctgtgcacgaactcgccgtcgccgccgcgcaccacgctcaccgcgccctccgcccgcaccgcggagacgaagggcgccagccagctgtagcacggctcgagcgtgtcccatgtgtagcctgacaccctcaaagccagctccttattgaacgtgtgtgccatagcggccgccgccaccatactataattaaacgtgttcacgtccacatgcaacactgccaagtcaatcaactgtccacatatcacaaactccagcgaggagtactgaggaaacacgaatgtgtaccctcggaaagcgttcacaccactgtcactttcactgataagtctgcgcttggcgccgcgcgcttcactcgctagctgcatgtaaacgttcagccagctgttcacggttatgggagtgaggctccagcacaggatcttgaggatgagtagttcttctagaaggatctcgtcggccgtgcacgcgccgtcggttacgtaagcgaactcgccgatcttcggtgggtacacttcttctactttggccgctatgaataaacatgttatacctacaagttgaagacggcccttttgtacgtcttctgtgttggagagatacctgtccacgtagtccactgtgaggtggaatgtctctcggtgcagtttataaacctcgcacacctcattcagccagtccaataatatagctctcatcctaggctgaaggctagggtgattgtcaaacatgctggggtttctcttggaggtagatctgttgtcctcctcacacatcttcctccagacatcagtggggtctgcccaggacaagcctgggagtggacatttgcgttttggtgatgaaggatagtcagatttgctggcaccaggccttttgttagagtgtggggtgcactcgcctctagccacattctccagggggcttaggacacagttgggaaggtcaggtatgcttggagggctcagaaagctatcaccatagtcaaggtctgtgaatacactccgtggttggttgtcaataatttcatagtgggagccctcatcatcactggagcaggatgactccactatgacattgtgtgctggctggtcagccaattcattatctatttttggagatattttgcgtgggggcatgttctcttgctcctcatcatcagtagaatttcttttccgcttcaatgccatagaagtttcactgctttcacatgaggagccagattctgccattgtgggcgaagctttggagctgctttatgttgcccctggcctgatcattcacaaaatccagtaaagtgagtaaggaaagtgtcctaggacactagctacagggttagaaaattatcactaaaattgcttaaaaatacagtttcttttcacacgagatgtacgataactcaagatgtataagttttaatcacacttttgatataaaatctacatttatcacttattttcagtttttcacggctcaataacgtccggctttccgcgcgaaaatgccgcggtaaaccctatttcgtttctgaatgaca

SEQ ID NO: 533 - DNA, 1180 bp, Plutella xylostella
  misc_feature (1)..(1180): Slc22a3; S22A3_RAT
gtagttaatatttatttctcccaatcatttcggcttcttctatcgtgttcggtaacttggctcccttggtctcgggctgcgtgagcacgagcgcggcgcacagcagcgcggcggcggcgaacagcagcgcgggcagcggcgcggagtagcgcgcgagcggcggcgtgagcggcgccagcaccgagcccacgcggcccaccatggacgaccagcccagcagcgagtggcggtggcgcgtggggtacagctccgacgtggccaggtacagcgacgtgaacaccagcgcgatgctgcacttgcccaccaggtacacggccagccgcggggccgcccacggcgccggcagcagcgccacgcacgcgcagcacgccgcgcacgtcacgtaccccgccagcagcgtgctgcgccgccccagccgctgcagcagcagcaccgccagccagtagccgggcacctccgcgcccgccgtcagcacgtagttgtggtacatgttgccggacagacgcaccgagttgatggacagcccgtagtacacgaacgtggtgcacgcccaccacaccggcgtcgtcaggcagcgacgcagcattatgggcgatttcaatatacgcttcaataacgattcctcatttatgtcagtgtagtcaggctttgggccagaattaaaggctgtaatcagattttttactgatgcgtcgtcgatttcgcgtctatttaaccatgctgcccttttaatagtcattttggcctgttcatttttatttttgcttagaagccaccgatgactttcagttaatataaacccgtaggaaagtacaattataaacatgggtgcataaagtgctatactgattttccgccattcgtagactgccatggctatgagtcccatgaacacttggccgagcgcgaatgatgaagacatggtggcgctggtaggcacgcgatactcggggctgacgatctctgtagccaaaatgtatgcggcgctgtatcccccgcctccgagagctgtctgtaggaactgtagagcgacatacatcgggtagttcacagagaacgcgcgaatcaatcccagcgtagcactgttgaatgtgaatataagtatcgacatgcgcctgccgaagtagtctgatataaaccccgcgagtgggagcgcgaccatgccgccgagactgttgag

SEQ ID NO: 534 - DNA, 950 bp, Plutella xylostella
  misc_feature (1)..(950): V-type proton ATPase subunit D; VATD_MANSE
gggctcaaatgtttgtttgttgtgttcagatgttggtgataatggttggttaccaatgttgggagttgacttgactgcacgctactaacaactggctagataaacgagtgtctacaatagtcggcgcggcgcctagaacagcaagtcttcgtcgccttcgtccagcaagttggcagcgtcggccaagtcctggccggcaagcagtgctgcttgtttacgcgcttccgctttctccttgatgatcttcttcttgtcttggatcttcttcagccggtagaactcctcacgctccaactcatccagctcagagatgatgtaagcgagagtacgctccaatcggggaatgattacgtgctcaatagcattgacacgtctgttagtgatcttgatgacctcatccaaggtaacaaaagaagtctgcagagaggccaactcaaccagcagtttaacagcactctggaagttcttcttcagcttggtcagctgttgaccacctcgggccaaaccagccagttcatatgtgtccgtaccatcagtgtatgactcaaagattgggagggtcacacctgcaacattgtctttctttgaacggatcttgatttgagccttagtaacattttgcaggacaacctggttgaaatctccagttgtgaatttagcctcagccagagagaatgcagcctctttcatcacatcacccataagagtttttgtctcgataattttgctcagaatcatacggaacctcacttggagggcgtcagccttcttcttcaagagaccatggcctttctgcgctccagccagacgaccttttatcaacatctgagcaccccgagaagggaaaatagctagcctatcttttccagacatattgatttaggaaaatatttggcgttttatcccttttttaggatttttactcccaaacctagatcacctgatgacag

SEQ ID NO: 535 - DNA, 4000 bp, Plutella xylostella
  misc_feature (1)..(4000): Eip74EF; E74EB_DROME
cccaagtctagcaccttgtttcctcactcgattcctgtttctccgctatccgacacctatcgcctcgaaagccttacgacctagctatcatgtacaatctattcgtttgaatgtaaaaaaatattatcaattgtgttctaatgtatctattaggtatattttgtttagttttgagctagctctctgcagacatcggggtctgaggccgcgtgtcctctgtacgtagaacctcacatacaaacgctcacggtacttgcattggatcaataaagacagacaatgtgtactatactaaatcttaaaacaaacttttgttacgctatctagttaaaaagtattatgattcataacattggaccacaaatattttaattatttattattaatattttattcaggtaacaaaaaatagggggtgcagcgcgatggtcactctgtgggtgggtgatatgctgctctgtgtaaatactctgtggtgatatgtccggagcgccacagcccctctaacagacttaataatatacaattaaattaacgaaatgaactagagattgttcactacaacacgatcatcacttattcgttagacatctattcaacacaaatattcacttaaaatatacagttttaatcagtttcctaaaagaaaattggcagtaggtttcagtaccagtgtaggttcaacagtgactccacaacgtataatacgacctaaattaatatcatcatggaaaattcggtttcgaaatgaaagaaaaggttttatagactcgcgctgaaatgtacaggccgtgctgaaacgaacgtcttcataatttcaccgatgatatacacattggataagacaacataaattttgtcgcacagactataaatttcagactaaaagtatcaacgacgtacatacatatttgcagaatttcaatatataattatttagatttaatataaaatataacagaggtgagggttgtcagtttcgtaacaaagtgtaaatacgcagatggccgcacaaaagcaccaaagtagatatttaaaaagtaatactatagatccttttgtatgcaatatatttgtattatataaaactcctttttattacgtaaatatttcttttttataatataaactcttatttttatgctatatatatttatatatagtattgcatatttaataatcggttcgttcaaatatttgagttgcttgaaccaggtatatatttttgcgtagaatgaggtagtggtatgatgcacagtcgttccaagtcacaacaactaacacacgatataagtagaaactttacaaacattaaaaaattcgttttcaacatggatacaaaaatctctttcatcccaatattataataacatctagcaaatttagtgttactcctctgaaattcccctaaagtatataaacatttgagcaatcattttcgcctccttagttacgataacattaataaattccgtgatagataaaactttcggtaaaccgtcatcctgtgtcgaagccggaaacatgtaggaatagatagagcatgacgtttgaaaaataaagaaatttatctaaaacgaacaaatgaacgccgtcactttaaagtcacatacacagttcactcccggcgccccctggcccggcgacccggcgaccggcggcctacgccagcgagcagtcgatctccacgatgtccttgggcacgtccacgaactggtacacgaggcgctggccgtccaccttggcgaggatcccgcgctggtagtagtagcgcagcgcgcgccccatggtctcgtagttcatgtccggcttgttcttgtgcagcccccacagccgcgacaccgccttggagtccaccagcttgaacacgcccttctcgcggttggtccacttgatgtagcgcgggcagtactcgcggtcctgcagcagcttcagcaggaactcccacaggtaggtggtggagccctcgcgcgacttgcgcttgacgccgggcgcgggcggcgcgtcgctgcgggcgcgcttcttgggcttgagcttgttgtggtggtggtggcgctggtagtcgccgaagtcgaacacggagtagggcagctcgtcgtgcggcagcggcggcgcgggcgcggtgaagtggtgcccgccgccgccgccgtagccgtagccgtagccctcgcgctccgccgcgctcacgggtgggcgcgcgtggccggcgtggtgctgcagcgaggtggccagctggtggtgctggtagaagggcaggaagggggtgtggaagggcgcggggggcggcggctgcagcctcgccttcagctcctcggcggagcccgcgccggatgatgacgactccacgtccgacacgccgctgtcggcgggagacggggggagggaaccagtattaggtgcggtgttatacaggtggtgccgcgcggcgggggcgggggccagcagcccgtgcagcagcgcgcggcccagcgacccccgcgcgcccagcggcatgcccgccggctcgccgtccactttacctccaccggcgtcatgcacctgcggcttccccgatggcacccgctgcatgggcgaggcgcttccgtagttcatacttgttccattataatccgtgctcagcggttcctgctttatgttactagatgtcgctgccagtttctccgcgagcagtgggttttgtgaggcgatgttgtatcgcgagttgttgagatgggcggcgttgttgatggcgttgccctgtctcagcagttgttgcaggcgctgctggccgtggttctgcagcagcgggccgctgggctggtagtacgagccctgcagctggctgcttgaaggtgaggatatgttgttgttctcctcttgcttaatttcaataggaggcacagacgacgcggtagaatttgtgaggtcggtaaaaaacgtgtcgaaattatcgaaggcggtctctcccagttgcttcaatatgtcatccgggtcggccgcctctgagctgtcgttctccaggttaaggccgcccacgatggtggacagttccgcctgcgacagttctccgagagatgtcgctacggacgtggccatctgctgcagctgcgcggccgccgaaccgttcgccgccgccaccgcgtcctgcaggcaattggagaggtcgaccatcctgccctcattctccgcggtccaccattcgtcttcaataaagggcatcgccagcgcaggcgcagcctgggcccccgccacggtgccgccgctactgcacgccaggtggcgctgtcgacttcacaacacaaacacttaaacttactaaaaacagttcgaaaacgtatctatagttacaataacactaataaattcgattgaatattttggcagcgttttggacggagcgaagaacattgttcgttgtaggtttgtttatgtacttcgttggtaagaacacattttggtggatgccgtgggtttgctaattgtcagggttgtctgtctgctgttccttcagccaggttacctcacgccccggaccccgcaccttttcagtagcgacctgcaaagatagagagcgtaggctttcacgtctttaaagatgtcctaacaattagaattagttgagggaagggataactatattagagtgatcgatactcatcactataaattaattatatttaatacctattattacgattgatacctaataactactaataagtattagttaagacataaattgcttggttaatcgttagtaggttatagggattctaccgaagttatatgtaagataatctttgttatcaaacacaaatctacagctcagctgcctctccaaaaggcctctcacataaagcctacttcccgcctccgccagcaaacgttggattccaacgttgcaggcagaatggcttgtaaattcgaacgtttgagatatcagaataaaaacttcgcttggttctttgtttgacttaaatgaattgaatgttgtgcgcaatcgcgataacctggccacgtc

SEQ ID NO: 536 - DNA, 310 bp, Plutella xylostella; identical to SEQ ID NO: 522
  misc_feature (1)..(310): Protein Wnt-4; WNT4_DROME

SEQ ID NO: 537 - DNA, 456 bp, Plutella xylostella
  misc_feature (1)..(456): Protein dachsous; DS_DROME
tccttagcagacagctgcacaacaaattcccctttggtatttccttcgaggacgtttgcaatatattgctgttgcgtaaatcggggagcgttgtcattctggtccaaaagatttacagtaatttcactgtatccgtataaaacaggagatccttctgttcgagccacgacaacgaattttcttttgggtcccgggaaagattcgtagtcaagatttgccgaattgttgactcgaataacgcctgtattggaatcgatgtcgaaagcgtactgatcgtttccacttccaaactcataaattattctttgtcgccttccatcacttcttactgctgttacttgcataacttctttcccatagtgaaggttctcgggtatagatatattgtatgtagcgttttggaagtgaagcataggtgtttggtcggaaaagtcaccaactcttatttctataagt

SEQ ID NO: 538 - DNA, 488 bp, Plutella xylostella
  misc_feature (1)..(488): CycE; CCNE_DROME
atatgcattatatcgatgctttgtagtaattaggaacactttaattattatttaacaaatataacactagcaaaacttcttgctttgtagataaacaatgtcagcgggttaataaaacatttaattcttaccaaaaattatggtgttcagcaatggatgtcttcggaatttaaaacagatccatttaatatttctatgtacaattaaattttaactgggcctaatatttggaagtcaatgttggatacggtatttgagaatgcatgtcgatgatagccatattatcgcgagattcgcatgcactgaagcataagcaaaaatacctatacgtatgtacagaactacaataatatacagctcttggaagactaatcgaatcattgagacaccttaaataaattgaagggtaagtttcatgcaaaaacgcgcatttagtagtatttagtgagttacaaagcgagaccacacagttagaaataatcactcaa

SEQ ID NO: 539 - DNA, 486 bp, Plutella xylostella
  misc_feature (1)..(486): Slc22a3; S22A3_RAT
cagcgacgcagcattatgggcgatttcaatatacgcttcaataacgattcctcatttatgtcagtgtagtcaggctttgggccagaattaaaggctgtaatcagattttttactgatgcgtcgtcgatttcgcgtctatttaaccatgctgcccttttaatagtcattttggcctgttcatttttatttttgcttagaagccaccgatgactttcagttaatataaacccgtaggaaagtacaattataaacatgggtgcataaagtgctatactgattttccgccattcgtagactgccatggctatgagtcccatgaacacttggccgagcgcgaatgatgaagacatggtggcgctggtaggcacgcgatactcggggctgacgatctctgtagccaaaatgtatgcggcgctgtatcccccgcctccgagagctgtctgtaggaactgtagagcgacatacatcgggtagttcacagagaac

SEQ ID NO: 540 - DNA, 455 bp, Plutella xylostella
  misc_feature (1)..(455): V-type proton ATPase subunit D; VATD_MANSE
ctcgggccaaaccagccagttcatatgtgtccgtaccatcagtgtatgactcaaagattgggagggtcacacctgcaacattgtctttctttgaacggatcttgatttgagccttagtaacattttgcaggacaacctggttgaaatctccagttgtgaatttagcctcagccagagagaatgcagcctctttcatcacatcacccataagagtttttgtctcgataattttgctcagaatcatacggaacctcacttggagggcgtcagccttcttcttcaagagaccatggcctttctgcgctccagccagacgaccttttatcaacatctgagcaccccgagaagggaaaatagctagcctatcttttccagacatattgatttaggaaaatatttggcgttttatcccttttttaggatttttactcccaaacctagatcacctgatgaca

SEQ ID NO: 541 - DNA, 488 bp, Plutella xylostella
  misc_feature (1)..(488): Eip74EF; E74EB_DROME
cactacaacacgatcatcacttattcgttagacatctattcaacacaaatattcacttaaaatatacagttttaatcagtttcctaaaagaaaattggcagtaggtttcagtaccagtgtaggttcaacagtgactccacaacgtataatacgacctaaattaatatcatcatggaaaattcggtttcgaaatgaaagaaaaggttttatagactcgcgctgaaatgtacaggccgtgctgaaacgaacgtcttcataatttcaccgatgatatacacattggataagacaacataaattttgtcgcacagactataaatttcagactaaaagtatcaacgacgtacatacatatttgcagaatttcaatatataattatttagatttaatataaaatataacagaggtgagggttgtcagtttcgtaacaaagtgtaaatacgcagatggccgcacaaaagcaccaaagtagatatttaaaaagtaa

SEQ ID NO: 542 - DNA, 1506 bp, Plutella xylostella
ataaactatattatctacctactctgtgcgtacttccaaataaaaaatcacaatgggtttgctacttagcttgtcggtgccaaacactagagctggtcaagggttagtcactgtggtggaagaattaaccagtcgttgactgcccagtgtctatttaaccctttcgaatgatgacaaaccttttgtctctcgggtcctctacgagcgatatttgaagataaaggaggataaactatattacctacctactctgtgcgtactttcaaataaaaaatcacaattgttcagaatgatttcaccgcgtggtactggtagtatatctcgggtaggctccttatggtgcaacgctcgctgtcaagctgacgaagacacattccacagttcagaatctcttcagaatggactccaacctaatcatttctcatcaatagtttttacaataaatacttaattcatttcgaaattgaactaccttaaccagcctaattcatttcgaaattgaaataccttctttaaccgaaccgtttaccgtttaggttgcagtagtcctaggtaccctaatgcagctataaaactaaaagtaaagcatacctatcaatccatcaaatcagttttattattctgtgctaactataactcaacaatgcctcctggacgaagtggtcgcagcggtggtggtggtggaagcaaaggtggaggaaataggagtggccgccgccgcgactaccagcacgcgccggcgcagcagcccgtggtggtcctgcgcccggcgccgcggcggtccatgttccgagacgccgctgccatagcggggggcgtcactgtcggcacggctgagcggcaacaagccagcaaggaggccgccaccgccgccgccgccggtcgttgcggcgcctccgcagaggtcaatgtttcgtgatgcagcggccgtggccgggggtgtggctgttggatcggcggtgggtcacgttgccggcgaagccatcacagtcggcggtgggtcacgtggccggcgaagccatcacgggcatgttctctggccgcaagaaggagcaagtacaggtgaggaagagagtctaccacgaggcgaggagagtctaccccgagggtaccagctgggcgccgagccgagtgggccctgcgccttcgagatctcacagttcctgcaatgcgccagccagacggagaatctagacgggtgcgcgtattacaatgacgcgctaaaggagtgcaagaagcggaaccgtttgccgtaacatatacctgatcaaaacctattagaaacaagaagggacataatgcatctattacaaacgagttgaagtgatcataccgtaacatatacttaaccaaaacctatttgaaccacgaagaacatagtaactaactaaaaacgatttgaaccacgaagaacataatccaaacgagttaaagtgatcataataacattacatccttttttaactgaaataaattcataagtaaagcaataaactggtcaaaaca

SEQ ID NO: 543 - DNA, 2686 bp, Plutella xylostella
tgtcagcatagactaatattgttggttgtcaaaaaaacacatccaaatatttgaagattttttatcgagaaatatttataaacgacagccatgagtgaatatattcaccagagcgacgctacgattcttatgactgttgaaaacctgatagccagggccatgggccctcctgatgaaaacaaagtggacttcaagataatccaagagctacttgtaatctttgctcggcaacttcgtatgctagaacatcatgtcgagttaaagcatggcttggacgccgaatttgattctgctgattggaaaaaagatgttgactagtgatatacaggctgggaaggtctcgccaaattgccagaaggtgataaactgccagaaggtgacaaagacccaaaaaagacaaaagaaatgtgcccctaaagaaaggaggggagggttaaagactacaaaaaagacaaaagaactgtgtccctaaagaaaggaggagatggcaagtcagaagatgctaaaaagcttcccaaagttggtgaaaacttgaaggttaaaagcaatgtgaaggatgaaggagagacggaggacaaaggtgggactggaagagatgggcaggctggttcaggagcaccctctggaaaaacaccaggccaaccctcagcgcgccgccgcgtgggcagcatcgaggtggtctctggctccgagttcgacctcctggcagcagccgtgaagaagctgcagagcatcgccagcccagggcgactgccgactaatgaacagttgacgagtgatagtgaaaccttgaagaagaaaagcgatgtgaagaccagtaaagaggaagacggagagacggagggtaaaggtgggaactatacgggatgggaaggtctcgcttagtgaggctatggatgctaagcagggtacgggctgggaagggctcggttgatgaggctatggatgctaagcagatcacagcccgcgtgcaagccacagaagagtccctctcgtggccagtggcccggatggtggacctcctgacgaagttggcgctcagtggcgccctgcccgcggacatggccagcaagatacaggagctgttgagctccgaggcaggggctggggcaggagcgggaaccggtaggagcgggaaccgggcggagcgggaagcggagccagtcgcgcggtgtgccagtcaagcggtgctgtcggtgatgccgcctggaaaattgcctgaagatggagtaacacgcgatgagatggaggaggctataaataatctacaaagcaatctgaagaaggttatgaatgattttatgacgaaggctttggtcgctgctgagaaagccaacaataacaccatggaaatacgcgataaaatgggtgaaactctagagatggccccaaaaataattgaaattaaagatttgattagcgattatgttgagcagcttcgcggcttagaagaagccattagaggacaggcggatttgtgtgctgaccaagtgacggaaatgcaggaggagttgaacaaaggtctagccgtgttccagggccccgtccccaatgctgagactgttgctgtgttggagctgacggatcggtacaacgggctgatgagccagacagaggctgtcatattcgacaacgctgtgcaaactgaaacacagaatcgtcttacggaaagttatggggagctgaacgaagcaataaacattcttcgagaagagaaggctgaccgggaagaggtcgcggacgctctccgggacaaggccagcaaggcgctgctgcagggcatgatgatggagagagacttccagagggcgaaggaactgctggaggggaggttggataagtgctttgataagttccagaggcagggggaggtttgggaggaagccctagccgacctgaaggaggaactagacacgaaggcgctagttctgcagctaacgcggctgcgtgaagaagcggtccagcgcctgcgcagcctagatgaggcaatacagtgtctggcgctggccgtcggggaaccttatgcggccctaataaccaaggagctgaacctaggcgccgcctgcgccacctgccagggtccagccaagatgcgcgtgtcagagcccacctatgacctgccgcctcttcagcccgagttcaagcccccgccagggcaggctagcgaggacccgggtctgtgcctgagaggggtgcttactgccaggccgcctgatccgagaacccacgcctgcctccgctgggcgggcggctcgcacaccctgctcaccagggcggtggcgcgccagcgagcctcggacctgccgccgcagcccccgtaccggcagtatgaggcttatggggaggatgggaagatgtaccgcatgcaagaggaatgccagccgtgtgaggagtgcctcgtggtctccgctccgaccgcggctgacggcgccggcgacacggcgcaggtggacattgctgaagtcaatctgaactgtgaaacggaacagtgtaaaccggaagatgatgacgataagaaagcaggaaatgagaatgaaagaaaatctggcactcaaaattaacgtgtaaacaagagaggatgcgcttcgatttacctagtctaatttattaatagataatattataatattttattaaaacacaggaattcattataaaatttattatcaaaataaatacctaaata

SEQ ID NO: 544 - DNA, 2117 bp, Plutella xylostella
catgctgaagaatgacagtgaatttgggacgccaacaagacccgttactctttaataaactgatgaataatgaagtgaggaacggcgggtcaattagaaccgattgtactccacacaacaatagcacgtctgccgatacgtcaccgaatctcagtggaaagggacatctaatacaaaatcgacgtttctcttcccagcttaaggtccacgttttcacctcaacatacaaagttatgaaaatccaaacaatgtcactttttctttcgttcgtttgcacatcacaatataccgcctaagtgcgtactgtgtctccagcctcgctttctaacattcaatatttatttatctacttactccttacgtgtgcatacgggcggagagacgcggcatcgtttagcattactcaggcaccgtcaaagggtacacacatactttacgtcatttggccaaaacagtagggggggtagcaggataaaatccatcacaagatttgggaagacatcataaccagccagttgtcggcactcgaagtatcatcaatcagaataacaaaggaatttattcttttgaaaatatgtggtcgaaacttgccgtgttagccgttttggcaacagtgaagtgtactccagtgccggaatatggagccgccgagaactttgtcagtgctgtgtcggagtgcatcgaaaaagacacatccgtgtgccttaaggtgattacagtgattctcgaaggattttttcgtgcggattgtgaagtgtatttttgtaaaagctccgaagtgacttcaagttggttttttcgtagatgtattttgaagccaagtgtttgaatacagcgtgttagcgagttttttcacgctgtttgttagcaattcactgtgacagtcaattgtattcaaaattaacttttgttcgtagtggttcagtttggatacaacaaaaaagtctacgtacagcttcataaagcttattccaaatcaaatttctatggttattattagtttctcagagttcattcagactgggatagacttaaaaaaatatatatgaacttaatatttcatcagtgatagccccataaaaaaatatataaataatttatacgactgcatattagttctaaaaagataatttattttattagcttttcaaaaagaccatctttattatcatcatcctccgacaatcatcagacggaccaactcaactccatcatcagcaccaacccacaataaaaatgctgggcataattttctcctaaaaagcacaacactttgtcatcagtcgtcatcatccagccactaccaaacatcttcttaccaataccaaactcatcacaaacttctctttacaggaaaaagctctaaagctaaccgaacgactagcctattcaaagaacattgacatcttcgaaggcatgagtttggtcaacctcggctcatccaggtctgcccgaagctacgagcctctagccgaagacctgaagaccagggaatctcagctggaggagaggatcgctgacaactttggagacttcttgggcaaccatgtcctccagttgaggctgactgacaacagcgatgagtccagaggcatggatgaggaaggccgcggcaaaaagaagaagcagatcaagaagctgttgcccctcctccttctgttgaagctcaagatggccgccctcatcccactgttcctcggaataatcgctttcgtcgccgtcaaggcagttttcctcggaaagatcatgttcgctatgaacgctgtcaacctgattaggaagcttctgtctaagggaggatcttcaggtggagcatctggccactcctcgtctcatcatgaagagcacccagggtactcttacgagccagcgcagtcatctggatggagcaaaagggccaacgacgcgtccagtatcgcgtacgctgcgcaaatccagcagtgatttgttctagttccaatgtagtgtgaatgttataatttattgcgtgattgtcttttgtttttggctgtctgcgaagatagcgtgttgtattgtatttgtacctcattaatttattgtgtgaataaaagttttaatttattaatttaaaaaaaaaaaaaaaaaaaaaaaaaaaa

SEQ ID NO: 545 - DNA, 2486 bp, Plutella xylostella
gtgcagacaatgagtggagcagtaagcgaagcggcgtggtcgtgattggtcaccgcggcctcgatgcgaggcgttctcaattcaaaacagtcgcgatcgtgtttatgtgaaacaaacaaagacatttcattccatccagtttttaaaaggtttatggagtattaattagctgttcttggcacgttgtcttaggcaacattagagacttctaataaagtgtggttgcaaaatcgtttcactacctttgtattgtatacgaatggtttgtaatttatcgtgtgctaggttgtctggttaaattggcatttatttcatcaactgtgaaatagttatgtagttttgaagtaaaataaacatatattaagacaaaaatgttatggcattaaatataagttcataatataattttaaattgcaggtaacatttttgtttcctttgcaagtttcgaaaaagttttgttgaaatcattacaatgaagtgtgatttgaatcaaaagtgcttttacctaagtttttgtgtacaagctgcagctgtcacttaccatccgaaggatttcgagtgtgaagcgtctattaatgttaattgaactaaatgttgacttcgccgaatttaaaaaatgttataatttactgctcagtaaattatattactcagttattataaaatgaaatctcttcaaatgactattacttaccatttaaagaactatttatgtaacagtgagtgcatcggaaaaaatacaatgtcagtatgaagattaaacattatcctggcaaagttgtcatggaggacccatggctctcgattactgatcgaaccatggaccttgtctatgccgccaactgggtaggagccggaaatctcagaacctacgatgaaaattataatcaacctcaaaaggttaaatttaacacaatctctagaagtaagtcctgtagagatatcggacgaaatactgacaaggatgataagacatactcaatagacaataataatgatcatcataatcaaaacggtaacttaaatggggaaaacatatctcagttggctaaataccaacaaaacatagaggaaaaggcgagagcgaataacatgtttactactcagactaaacttaaacatagctacagttttaaagacatgcctaacggatatagaccctcaactctgaaaagagtgaaaagaagaaacttcacggaatgggatgtagaacctaacgtgaccaataataaacatccaccaataccaccacaacgtagagattctctaaaatatgctcatagacaaagaaaagttgattccaaaaaaagtatccacacactacctgatcctggcccagttccaccagatccatcttctgaatcatattacgaatactattcgagagtaagccagcaagttaatgacactgataatgataaaatgaaaaaggtgcaaatagacacaagtaaagagaaaaacttcatacacaatggccacgaaggtaaaaatggcaatggaagtttcagtaacgatacgatgtatcaactcatcaacaccatggcaactttagatctgactcctataaaatctaggtccggaaaaaacagcctcgacacggattgcgaggcggaagatttgggtatatacatgcggcctattaacgaatcgttatcaacatgcgatccacttcctgagcgcacttcactaccaacgaacgatagaagtagacgcatggaagactcgaagcctggcttgcgttctaagtcattgagagtcaaaagcgaaggaagacctccacttcgtgcatacctattcgtcgtcaaacctgacagagaatcatacaatggagtcactgttacacaaccaaaaagaaacctatctcctagtgaacaattatctcttatgcagtacgaaatgtacaaaggtggcccaaaaaatccacctgttcccccgattagtaacggttttcactcatctggatcgggcaaagaaagtgattatcggactttaagtggtgttgcaagacaaatcaaacgtgacaaatatggaaagttatataatacagtgagagtgaaaagtgacaataggtacgatagatacaatgacttactttttgatatgccaaaagagcgtagtgatgaaagagtttcgctgagtaacggttactctagaagtgctaaaagttcttcgagtggatccgattcggatttctctattcctagacctaagttgatagtgcctgtccatacatatggcactagaaagaggaggactggtaatctctgtcagcgtgaaagcaacgcaactgatccgtctgacgctggaatccagcttgaagtcacgcgactagaagacacaaacgacaaagcggttgagaaacaacataccaataatggagatgcagagggtcgcgtggaggtgtcccgcgagaacaagtacctcagcacgatggcccccggcaaggtgttcggagagctggccatcttgtacaactgcaagagga

SEQ ID NO: 546 - DNA, 2343 bp, Plutella xylostella
tacttatatgtggtttgattgataacgcgtttcatacggctatgtaccaggcgagggttgcaatcacgaagcagccagcctaccgaccgcgcgctgcagtcaatcaaagacatctcgcgagaatagttgcctgtccgtaaaaaaagaaaaagaaattggcggtaaaattttagaacagtttgtttatgaaagtttgaatttaaaattatttagtttcttttgtttttgttccttattcgtttgtagtaaatacttaaacggaaaatgactacgctcctgaggaaaatgtggaaaactcactccaaacacaagagtaagttgaagttaattttaaattaataggtacttaagtacctactaaatactaccataattctctataaattagtaggtaggtaatattttaagtaaaatgtagcataaagtcaaccttaacaaacttgtgcataggtataaaagactactacgattcactgacttcactgaagatgaccgtaaaactcagtcgaaaatttacaatgctcgttagaataataaatattggatgtttccgaccacgatctatgttacagcaaagaaacgacccgagtacagcttaggtggatagaagcggtcagctatattgaaggcgcggtacacaacaatcaattaagtaaataaagaaatgtcacatgaaatatcttgctcttccattgtagcgtgattgtcgcagtaagtaggtaaggtacatagtagctttacctaggacgaagaggtgcctactaatattatagtaagtacctacttatgtatattataacatgtgctaaaccttagtaagtaagtacctagtatctaacatcctgtctatttaaccaagaggtatgtcagagtcagtatgttatctctatttaaagttaaaagcacactcagcaagttggacgctgccatttcctatttatttgaacttgcctgtcaggtcaacttataaacttgtatatacttaagtacctacctataactataggcagcaagataattaataagtaccttccctacctcctattgttgactgtacctttagtccatgtctatgacctaactatttacctagttaagtaactatatgtatatttatggtggacggtggtaagatttaaatttatgggtcataaaaatgttgttgtaggtagatcggtcatacctacctatctgcttatctaactttgcatctaaatatctaggtacctactacttaactaaaaagcggctattatttaggtaggtacctatttgtggattgatcgagtcagtcttcagtctcataacggttggattttcagtttgcgcacaattgaaattttgaatgctactgctattcagtttctaacacctattttataaaatacaaaattgtgaaaatttacatcatcgcaagatatatccgccaaaaaacgtttgaaaagttttgctctactcctagaaaattcccgccttaaacttttacgtctttattaagtaaacgttctcaagttggcagcgctgtatcgcggaaagcgcctcgctgcgttctgaaatagacgtctgaatccagctcggctgcagttttctctctaattactacggaattaggagctctcaccagcagatccggatcagactacgataaaaaacccaccagctcgagtttctgaacttgtcaacccgttgtatcgcttccatcggccattttccgctaagttgtaggtagacgtagtttttgcggcggctagcgaatgcagcttaggaatgttaacgcagtgcgaataacgatgtgtcgggacggcttacggagctttcatttgacccacatgtatgagcgagcttgctccttactgatgaaagtttctataagtactctacgtggaaaagctttagttttcttaagggtttcttttcattgtttgatgaagtatgagcccaactttacttgaaccatccctttttctaaatccgtacacacacatattacacagtaatagctgctacagttcctataggtacctgaagatagatagagatatacaatttatttgtataccaagaaaaactgtcctctccgttctcttccagacaacctatggcacacatatttatagtagaggtagttattaaaaacttcgattataaattcattgacgccacagttaaggcagctgttgtgtatattgtttaacccctgcattaaacaataagttaaccagtctattgacaaaacaacgtagatagccatagacacaaagctatgcgaagagtgggcgctggcagagcacgagggggagggctggtggcgcgagtcgggcgcggcggcgcgctccgaggtaa

SEQ ID NO: 547 - DNA, 1134 bp, Plutella xylostella
ttttttttcagaagtttttttttatcacaagtagaagcgttttttatatccaaattttttgtgatgtagttaatatttaccctaaattttgtgcgtgctataagcgatttattattttcgttgataccttctctcataagagggctgtgaatagataaactaccctctgtagacagagcattttgacagtagaccggaggagattttggacactattggtagacagtgagtgagatgtcaaatgtatcgtaaacgggtaaagataaagtcgatagagctccatggctgagcgcctcggccctcgaagctccgaggtgaacgcactagagcagcgtggctacctcatcggcaggaagatcgggcagggctcctacgccagtgtgcacctgtccgagtactgcgatgccgccagccccaagcggatgcacctcgcttgcaagatcttcgacaaagaaaaggccccgagggattttttagaaaagtttttcccccgagagttggacatcctcaccaaaatagaaaatccacacatcattcaagtgcacagtattttacagcgaggaccgagagtgtttatatttatgcgatatgctgataatggtgacctcttagactttataaaacggaacggtgtcgtcccagaaaatcaagcgaagctatggttcagacagatggcgagcgggttgcaataccttcatagtaaaaatatagcgcaccgtgacctcaagtgtgagaacattctactatcgcgtcggtttaacgtgaagttggcggacttcggctttgccagattctgcacggatggagacaaccgacgagtcctcagtcaaacgtactgcggctctgcagcgtacgccgcgccggaggtggtgagcggcacgccctacaacccgaaactagccgacgtgtggtctctcgggatcatcctgttcatcatgctgaacgcatcgatgcccttcgacgactcgaacctgcgcaagctgctgaaggaccagatgtctcgcaactgggtgttccgctcgcggatcagagactcggtgtcggcggcggcgaagtcgatcgtgaggcatatattggagccggacattacgctgcggctgacgctggaccgggtgctgtcgcacgagtggacca

SEQ ID NO: 548 - DNA, 1617 bp, Plutella xylostella
gggtttaaatcaggccaatactttatttttaaaatattgttttgtgttgtaaatcgcttaaagtgccagttactagtacttttaccctacgttaattttatcgtagactttttgaataggtactggcctggaacatagtgattgtttttgatcgtgttattatgtcatttaacatgtcaaatttttagtgactaacaatggctaaaatttgtttggctacaaaattataatgataataaataactaacagttaaacctactatctaaactaatattttaatacattttaaaatcataacaaggcatcatggatggggagcccgattatatgtcggataccggcactaactgcaaccttcacactacatcagaaacatacccagagaatcttaacaagctggaaacattagagaagaaagctgttcatcttagattagtattggaaaaggatttcaaggcagctgatatgaaatggagtttattcgtggccgcagcgtttagtttcagatatgaaagctgcttgaagccgtttccaccagggtactggaaaaatggtatcaaggatatggatgaactgcttagtactataaccgacgtaccggcacttgatttacttctgcgtcaactggataatctagatgatttgaaaagctacgccgaaattatagacctcctgttttatgtcctagtcaggttgaaagaacccatcataaagacagttccaatagaatcgcatggaaacgtgttattgcacgtgaactctactgtgcccgcagccaagcctcagtatgttttccaagtggtcagctcaaataaatcaacagcggaagtgaaatggagggaattggcaaaaaaccacaacgtattttatgcttttcatggaaatcgtctcgaaaatttctatagcatgttacattgcggcattcaacaaaagccgatgtgcagcacgggcggcgggatgtttttgtcgccggagctgagcgcgtcgctgcctcacagcgccgggggcttcggctggggcgccagctgcctgggcggccacctggcctgcgtcgcgctctgcgagatcctcgacgtgccggaaggcatcaactatcagcgccctgtcaccaatcaaggtgatggcggctacgacgacagcagaagcgttgatagaaaatcaaatgcagatgaagctatgtataagcagttgccgaattactacgtcacaaatgctgagctggtgcgagtgcggtatctgctcatttatgccaagccccttgcttcctcgaggcttcccactggccataataagaaagacggaggaatacggaaatggtttgcaaggcataaattattttcaattctatttggatatggactaatgttagcgacaattggcctagcaaataatcagccactgcattattatttcaaaatgtttatgaagaaattagaacttgcttactctaatgttaaagtgtcataaagtttatttttctaatttgttcgtttaaaattccggtatgtccaaaaatgtaaccagttaagtaccgaatgtgtgttaggcatataatgcgctataaataactaataaaatattttaatagcaggccaaaaaaaaaaaaaaaaaaaaaa

SEQ ID NO: 549 - DNA, 710 bp, Plutella xylostella
gtcatctgaacgtggcctattattaaagtgtacctaccagtacctacctacttatggtcacttttgtccgcacatgtcggcactcagaataataaccgtactatgtattgggtacaaatctcggaataataacagcttcgtccttataagatcctcctttgccagttgaccaaacagtttcaaaactatcaactgatcaacactaaacaactgatctgacgtttattacatatcaaaatggccaacgaagcggaagaaaccgtccgtaaattgaccctccacaagggcgtagccggagtaataatcgtgaacggcgaaggtatacccatcaagaccactttagacaaccacacttccgtacaatacgccggtttgatgtctgtctgtacaatacgctggtttgatgtcctccctggtggacaaagctagatctgtggtcagagacttggatcccacaaacgaactgaccttcctgaggatacgaagcaagaagactgaggttatggtggctccagacaaagattttatacttatagtggtgcagaatcctacggattaaccaaggcttttgttttaggtatggggtagatgttttgtgtatcattgcaaggatttaaatacaagccctacagaatcctacggattagccaaggcttttgtgtggggtagacgtcttgtgtatctgtgcaaggatttgaatacatgccacc

SEQ ID NO: 550 - DNA, 12551 bp, Plutella xylostella
tgcccaactacttgccggactacttgcccaactacttgccggactacttgcccaactacttgccggactacgtgcccaactacttgccggactacgtgcccaactacttgctcaactacttgcccaactacttgtcctactacttgcccaacaacttgctcaacaacttgcccaactacttgcccaaccacttgtccaactacttgcccaaccacttgtccaacaacttgcccaacaacttgcccgactacttgccctacaacttgctcctcgacgtgccccactaccgtcacctgccccacggttcccatcccacctattgcatgcgggaagacgacaacctgcgagcctccagaggaaaccacccttaacaccaaggacataaggaggacgacgcggagaaggttcgtctcgcatcgcaagaagctgcataagacggagttcccacgcacgtaccccacgactccaaagagcaccacgcgatgcaccagaaagtccacgaagtcgaagtgcaccaccacgaaaaagccgacgacgaccaaatgcaccacgaagcgcacctgcccgacgactaccaagcggacaacgaccaccaccactaccacgactactactactccttccaccaccacctgcgccaccaccgtccccgactgctcacgcacaacctgcccctacggattctctcgcttccccaaaaccatacgaaaccgagccgccatgcacgcctgttgcaacaacagacgcccaaattaccgcaccactcaaaggaccacaaatttttttcaagacaaatgtgactacgatattcctgaagatccgaccccggaagaacagagccgctgccccagctgcagatgcaataacaagaatatcgcctggataccggagccctgcaaaagcaagcccatgataaaatttatcccagatccgccgaaacgcgataatccaaatagctgctgcagtaaatgccactgctcaaacgataaatcatcgatgctggacaaactgaagagtatatgtagcagctgtggcagtggcatccatcatatagccgaaggtgatagtaaatgcggaaatattaacaaagattgcaacaaatgcggaggatacgctaacggtccaaaccttgatgagatatcaaccatagaccatgtcaaatgtagcaaatgtggcggtaacaaatttcctttttctattcccggagaaaacgttaaagtccttaaatgtatcaattgcggccacatgtcaaacgtcctagcagctgatgagccagtaacggacaagtgtggtcaagtgtttcctccggggtcagaaaaagataaggacttggttacgaaagcaaaactgaaactacccaccactaagtctctaattgatcccgaaaatccggataaaccaccaagaataccgatggataaatgcggtcaaatgtacccacctggtgatgataaagatctaagacaacctaatgatgaagaaattgctgaagctatcagaaagaaaggtgtttgtaataattgcggccagtgttggccaatagacaagtcaacggacaagacaattgtccacgaccaagatctagacccagatgcggatatgagaacatgtgaagaacctacaacaacagtcaaagttgatgccagttcaacggaaaaagaaaaatgttgcgacggtgttgatttgcaagatattgttgataaactcacgggcaaaaataagaaacaaaaacaaaaagacaaaaaggtagtagaagagaactgtgacagctgtggccagtgtgagcctgcccagactaaagcaggcagcggcggtggaagtggaggcagcggtggtggaggtggaggcagcggtggcggtggtgccaaaaatcttaaacacaccacggcaaatttctttacacgggctatggatgaaatcagagatcattttaaaatgaagaagggtaaagactcaaaatttcatcagtcatttgataggccacctgtaggtggtcctataagctttgatgaaccagaaactcaagaatcactatcacggcacattcctcttcaatcagcaatatcaccgatcaagcagccgccactttattataaacagcaaataagaaaatacactgaaactctaagaaggccgtaccggaataaaaatgaaaaactagataaaaacgggctaaaacttaaagcacctaaagctaaagaatttgaggatgattaccagatgttaagactttctgaagcattgctagtgagtcaaagtgaacagaatctggaccaccttaccactgattcatctattgactacccattatttgtaaaaaagaaacacgaaaagagagaatgtaattatcaaacaactagtatggcagatcagaaacttaattatgaagatgaatatacagatgataccaacgcacccgaagcaacagaaatagagaaactctgttcatccgacatgccagagtctatcaaagaaataagtgaaaaaatatcgtacaacaactatgtgaaggggttcaaagactacctcaatgtcacgagagatatagcaaatgataactttcctgatgctgttaaattccaagctcatatgcatcacaaagtagatgatatcggtaaatacattgaagaaaaactccctcaaataccttcattgaaaaccaaatcaaaacggctatttgaagatatcgaggctccagacgatcaggaaatgtctaccaaaagtgatgactcttggttcaaaaagtactttgaattttatattgaaaaagatttacctaagaaatacaattcaacacaagtggtcgagctgaaatctccaaagaatggacttgtaaatggtactgcattgaagaaagacagtgatagagcaatagtggcactagctaatcaaaaagaaaactctgaactatctgaaagttgtcaggatatagacgaaggcaacaacagggaagtgcgagagagtgaattaaatcccaccacggaagctgtagatcaactgtcagcagaattattatctaacattactgagatcgatgtttttatggatgcagacacaacaacaaattcagctgaaaagagatgcgctcttggaagatatattgaatcaaatattatggataaatttttcggaaaggaaaaaacaattgataaaaataataaaaaagaaattaaagaccatggtattgacaaaaaaccaacaacaaaatctcacagggtgaaaagacgagtccaacataaaacgaaaaatttctatgaatatgaagacaagccgtgtctacataaaggaaagaaatctcaaataccagcaccaatcatcgattaccataaagatacgcctactgtaaaaccaataaaggcaagtatgttcggtcgaatgatgtctggaatcaaaagtattggaaaacataacaaaacaccgacagttaaaaaaaagcacagaaataaaaaacgtaaaggtaaaaaacacaaggctgacaaaaggagtgttcagtcagtatgcagaagaaacgcttttcagaaaataaaggattttttcaaaatgtcagaatcactcgagccacacaataaaagccaaaatgaagctcctgaatctgatgatttaggggaaactaaacaaaattactttaaaccaatcaagtatagtagaatggacaacatgaatgatataatgaaaataatgccagatatgcctcatagccaagaggactcatcggaaaaaagacatggatcggcaaaaagtgaaagagattatctaaaggagttaccagagaaagaatggattgataaccacaaattcggtcctttaacaactgtagataattattattccgttcaaagaagtcagtttgatgataaacctgtaatccaggacgatgatataaatagagatgacaatatcagcttcaatgacaatgtattaaaatcatctcgaagaaatgagaacaaacccctcaatgtactcgaactttacgatgctggaaaaatattggaacagtctcctgaaccatatgagtttaacaaagatgatgaccaaacgttttctttcgaatccaacattgaaaataatattaagccgaaggaaaaagatctgagaccttttgaatttaaaatattaccggatgcacccaacgagatcccttcggacactaatccgacaaatcctgtccaaccatctcggagattccctttttttaccgaacgcttgatagaagatgcgcctttgaatcattatgataatcgacataaggataaagaaaacaaaccaaaaagaccacataatacaagtcatgataaatctgctttgaggaaagaaccagaaatatcttatcatttgccaagtccacatgaagtagctgatgtcactgaagccggcaattcactaactaagacattagaagaggataagctacattctcacaaaaagaaaatgcatggaaaacatggtattaacaaggaaaatattgccagagcctctgccaatccagctgtcttgatagtgaatagtacagaaatgccaaagatagaaaaagataacaaaaatgtccagtacgattatggagcagttgaagagcaagtagagattcaaagcataagtgctagtcctacggccaagccagaactaagattaagttcttatttctcacaacggtcctatcccaatggggtgactaaagagatgatcgaatggcagagctaccacccgagcaatctggtcgtagataaaccacatatttccacagttcatactgaaagaaatcccttatctaacgtagctaaatgtgtcaaaaagtcaattaatactgtcacgaacaataatatatccgtaagtgaaaataaagatatgccacaaacaaaatcagtaagcgcctttgttgaaaacgcaacggtagccgttaccacagatcaaggaagcttagttgaaaataacgacaagacagattacaatgttaaacttttacaggaaagtctagaagaggaatagctaagcctgaagccaaagctcctgtaacgagtgtgtctccacaacctgaacattattttaaccctcctttgccaatgaaaagcgaggaattcgaaaaatttctcaaagaaaactcactagacattcattcactatcagcgccgataaacatagacgatctaagcaagtggctagactcccaaacagttaaccatcccgaaatcaaacagcacaagaaaactaaattacgggaacaagaaatgaaccacaataatttaggagtattgggcaaaactgagaacgaatttgaaagaaaaaacaagaaccataattacaagaataacataaaacatggtattcataacaaagctaatgttaatgcagtaactgatgagattgatgctgaaacagaccctaaatacaaaaaactatatctaaaacctgcgtcccataacttcagtgaggaatcggaagtctttgaaaaaagtgaactaaattcgatttcaaattcgaaaccaattttcattgatctaccaacttattatgaaccgaacacagaacctctcctctcatgtatcacagctaaaccaacatcaaactgggatgaattgatgaactacttatacggattagatcttctagataaactaaccaaactcgatatcatcaacttttttgaaacaaaactctcagcatatcccaattcagctacagttgaaaacaaaactgagaatgaaagcgcaaaaactttaacaaaaatacttaaaagtcctgattgtacataagttaatttcataaaagtttttagacactcacgtgaagtggaaaactgtgaaagaaggaagaagcacattaacaaacgggaagtagagtctacaggtacaacaaaccgtattgctcgggcatctcttgtatacgatctcaaaaatactggtccaagcaaaaaaggacttaaggttaaactcagatttcttcctgatattttagttccagaacacacatggggtatatcacattactttactaaggccaatattgatgaggcgactaatacgatcgaacaacctataaacattacaagcccagctaaatatgttattttggaaataactaccgaaaaattagacacacaattgcttctcggatctagccctatagatacaaaatttcagccacgcattatacaagaaaagaaaactgcttactcaacggcaacgacacctaatatcccaacagtaaatgttggccatttgaaaatatcgactacagacaaagctacccattccaacaaaaaatctgatgatttagaaaaaactactttaaatgcagctgtatttgattacattaatctgttattgggaaaaaatatagctcgaagtgctattgatgacaaaagtgtaaatctaaatcatcataggaatataactaaaatttctggattagtcaatgctattagaagtggcattgccaaacataaaatattttcgtttggatcagctgaagaattgcccaagattaattcttcttttccagtaagtgagcctacacttactttcaatataagtaatcaatatgatagcaacttgactggaaaaatagataggtttggaaacgtagtaatatatgatacgccacacaaaaagacattaaaagaaaaatgtgatgaactgctgccaaaagaatcttgtgaagattatatctgtcatcatgatcaagcatgttgttgcaataacaaaactgagaatgtgaaaatcttggaaactggagtagatacttctgattgccaaaagtctgatcaatatgactcagattcaaaaagtattaatttaagtcaactaaatgaatatgaagttcaaaaatctgattttaacactccaatagaatgtaatgatggctgtgcaaagaaatatgaaaatagaaatttaaatattacaatggacctcaacaacttctttggtccattaaacagttcacatcccaagaatacctctaaaaatgctacacatactcgtatttctgttggtgaaataatatctacaaataaaattgacgctgaattaaagaacgtttctaagctatcggcttctaaaaacgtgtgtcttgaagagagcaagcaaattgacacaatacaagcaaataaaggtggagaaagcaagaacttgaagccaaatatatctaagaataaaacacgattgaatacgttagcttaccgatatttaccttttgtcatgatgatgaaggacaagaataaacgaaatgacaagccccatatttcaagcattcaaaaagactttaatcctacatctgatttgtatgttcatacagaattttataacgaagccgttgtgtcggagccatataataataaaacagctaaaatatacacggcaaaagatgttcaacagtttgaagttatagttgaataccctgttgataaagattcaactgagcgtacactagagccatctaaaatatcaaataaagaacaaaatacacaacataatcaaatgctaacaggcagattaaagaaaagcggaaatagttcttatgttaaaaaaatattttcagctcgtctggataaaccggttgatatcacttaccaattacttgatagtaatcgtgaagtcgtaagtgctgatgttaaaaaaagtaatgaagtaactacagaaggattgtgtttgttacttgccaacccaaaaaatgaaagcattttagaattaaatcgagatgcaagacaattaaactcaattaatataaccgatgctataaatgtatttcaaaaatctagcccttcaccattgggacgtattaatctcagcagagatattataacgggcatgctatcgaaacttatcgaagaatcatttactgaaaccagtgaaaatcttgtggatgcgcaacaaaacataaataatccaaccaacgttacacaaaagccaaattatcttgaggaaaacttaattaacacgcctggaacagaacaaaataattttgcaaataacattagtgcaatttgtaattcatcattacttttcgtgttaccgacagcgacagtccaatcaatgaaagaaaatgaaatcaatgaaacaaatgatgatttaagtaatcttcatgcaactggtgaaagagttttcacgaatccgactattgaaaatagtgatattattcatgagctatttgaatctatcttaaaatgtacaaataagacaggttcccaaaaaaatacgaaaaaacgtgaaataaaacctattctgaatgtgcaaattgaatcaccattgataactgatagcggcggagatttctggtataactatattcacaaacactcttccccaaacccaatatctggcaaatctgcttctaatcacgacgacgaaaacgagagtgattcattaaaaataacggatgatgagttggcacgactaatagatttacttatcatgaaaactaatgaaaagatgaaagtcaatgaaaattgtacagtattggcgaacacatataaactatcaacacatgacagcaacgatgataataatatacccagaatattggtaaacgtaactacagaagcactatatgaaggtttgcgggaaacgagtgaagctaccttagaaaatactaatcctgctgaaacttctacccatgtgggtgagacaaatgtatttatagctaatggagacagtaccattcaaggctatgttacaaaattacgctgggaacgtgatgatgcagcagtaactatgagtgaaaaagctgatgttaatagaagggatgttttatttcgcatcttgaaatttgaagctaataaattagttcaggaattgctaaaatttaaaagtgatttgtgtatgaattcttcagattattcggtaaatgactatgatcaggataacaaagatactaaaaagagttttctgcctgtttcaggttagcagcaacatattatattaacaaaaacaactctgataaaatacttgaagcattaacatcattgcaggtagcccctgaaagaaagtcagtacttgacacaataatggatacgttgcatcataaagttgaattaataccaaccaaacacgtaaatcataatgggaaagatagcatacagttttcaccgcttggacaagtcgctaggaatataagcaaatcatcaactgaaaatactcttaaagctgaggtagaaaatgaaacacactctgatcaatggaatcatctttcatttgaaaaaaactcttttaatccagagttccaaaatcatgttccgaaatataacattccaacacacaatcctgaacaaaaatatagtcttctagactgggacgataaatataacaagccttattataaacaggactatagtgattacgcctacaaatataaaattgaagacattaattataggtttaataattctaaagatgaatttcaagaccgctatgaaaaagaaccgaacagtaatgatgatatatataaatataccacttacaaatataaagagtatgaaggtcacactaaatcgtacaaaacatctcattacaacgatgaaatagataatgattatctgaattatgaagatacttacaagaaaccgtatagtctggaaaaatttgatgctctcgataatagtcatgattcaatcgaaactccatctgaagaagttaaacatgtttttaacataaataaaattaaaagtcccatacgccataagtatcgacaaccaggccaccgcaataaaatagaaagcgttcacaggactgcgcatgaagataataagaaaccagttgctcacaaatgtcaggacgatgtgctgcacccaacaagtcttaaaccaaaaaaaaacaagagccataagaaaaagcagcaccagtttagtcacccgaaggaccctagtcatagtcctcaaggtgatagaaatccacatgcacatccctgtatgcaccattattctcaccacaatagtccacacgctttgtcaaaccctggcctcacatatctatctggtcatcaaagtgaatttggtgcctcttcaagctttgcaaccacaaaattacaccgaactaaactatttcaattcaaatattcaccgaaaaatattatcatgtcagcatctgaaccaatgttgatgaattatcgaggaatcacagatgttaatcattctgctgagaatattggatctacaactcccactttcgaaccaggtgttgatagaacagcaacatgtgataccactgcagagcccctatgtgcaatagctacatctactgtttctgatactgaaacatcagtaaaacctgatcatgttaaaacattgattgaaaaaccaatcaattgcagtactgtagttttcaattcatcaattaatgagactgaacacgctaacaacatttcactggctgaaagtaaagaggaagagctctgtgatctagaagctacttacatggaaatcttagcaaaattccacaatctgccgacgaaaaatttcagcaatttcgtgaaagaccttccttgttacaagtataaggtagtgccgaattcgtttttcctggaaatcaagagaaatgatttgaagaacaggaatccatattttctgaagaacttaaaacggcactggataagacataaaaggtcactaatgtcagtgaatgaaaatggatatacagaggataacggaatttacaatcctttatcaaaattcagaagaaaaagagcacttgatttaaaattactgactgaagggttaaggtgcctacccaatttgtctgacacacagaatgatgtttacgcaatcctgggtgatacggtcaccataggatgcgaagatgatgatgagaacaaactggctaaatctcaaaaaccttgccagtggacagcagaacaaaatgccatgctgaattacgaacacgtgatagctgatgaccaaaagattgtgttcagggacgtccagccaaggaatattggagtttataactgtactaagaacaacaacctacatcgcagtgtgaaacttcatgtggtgacaattccgagttttaacatcgtatcaacaccggcctacgatgcagccacgggttgccattacgatgatttgaaggcttttcaagatggcttagctactgagatgtcgaggctcgcttgttctgacgacagcttctgcacagtcagagtcgacgagccggtctgtgtgagagacgaagaaacggacaaggcctcgttgcgtatgacggcggtgctgacgccgacccgcgtgccgctcgcgtgcggcgcgcagtgttcgcgggatctggcgagctcgctggctttgctggctgctggcaacgtgcccgcgctgcttagtgtgcctgtgacagtattcaatggagagaggaacaggacatttactgccagcaccggagcaacggagagaggaacagaagctttaccgccagcaccggagcagctggaggcgatcaaaagtggattatcacgcatacattgaggagtagagattccaaccaccaccacgagttcacctcgctgacgtcatccatgatgcccggagacctgaatgtggtggtgctgtgtcccgccgggtactaccttctgcctgagaagaagatctgtgaagcctgtccaaacaacaccttcgctcggtcaggggccacctcctgcaccccgtgcccccgcggcgcctccacggcgcagccagccagcgccgagtgccaataccagatgcgacggtataccagcgcagccgcttcgccttcatcagcaagtatgctctggtggctggtatactgctgtgtctgtgtgctgtgggcgctctgtgcacccgcccggctgtagggaccagcgagaatactggtgcagaccagccgatgagagccaacaacaagccaggcgcgtcctccgcggcgtggcagcgagccaggcgcgccctgtgcggcggccgctgtcgccgtcgcgcgtcattctggccaggctgttccgagggtcctcgtccagggcggctactgtggctgagtcgcaatctataagactccaagattgtgcggaggagtctaacccgccgccgccgccactgccaccaatagactttgactattgatgttaaccatgggttaactaatcaggacttagataaaaactatagctaaatgggaagatagggtgtggaaatggtttatgtaaataaaaactgtagccagatgggaagataggcgtaaaaatggtttatgtgaaccagaatctcatggacagcgatttatagtgtagggttttatttcataggactaaagataataggataaattttcaatggcaatggattttcctcaatgtctatcataagattctggttgacataaagcgaaatattatacttcgtaaataaatgttataggtcgcgtatttttgtaagtgtatacattgtcagttacttttagattagtgtacaaaacattgtttaagtgtgcacacttgttatttaaattagttaattatttattgtaacgttgtatattttctaagtgttattgtatgtttgttatgtctgtaactttcggttcggtaaataaaagttcagtggttgtttagtgtatatttcaaaaaaa

SEQ ID NO: 551 - DNA, 1829 bp, Plutella xylostella
cccattattatttatggagatgtatgggggcaagaaagtcccaaagatacagatactatgtacaaaaacacaaacataatcaacacgtatcatatatgacttttctacatacatttttacttggcctgtcgtggcctcgctcttcttgatagcattgtctttaaggatatttaactaggtaatttccatattacagtcataattgtcaaaaaagtaaataaatacaacacgcaagccaaaaatattcgaaaaatccatatccttatatatttttttgggttctatttataagctaatcctcgaaaatgttaaggtcacgcttaaacttcacgtccgatgattccgaactaaagattaaaggggaagtaaaaatctttccaccgcgaaaagacagcatctacgaggaaaccagcgagcatgtggcgaggaaactgttcaagtcagaggtcagcgtcaggctgagcatgatagggaaaaccgcagagggtgacgactataggatatgttcagacgattgtgtttgtgaggtatgtaatacccactctggtatatggacaaataaatctgaaaatgcagaaaggataaaaaagaaccagcttagattcagctaacaaccgcataataggttctgaacccaggaagaaaatcattctacagcctataaataaaaagttacaatacgattttcgatacacatatgtcaaggcgatatgtaccaacatgggtctcaccaacatagacgcgatgctcagcttcaaacatctgcagtacatagacgtatcccacaacaaactcactttagtcaaccttcaagtcctaacgaaactaccttacgttctgtttctacaagctgatgataataaacttgattccgcagcgctcaaccccatggagtaccttcaagtgatagtaatgaactacaacaaaataacctcagtttctgatgtttaccaaccagaactttccactctggagctcggtcacaacaaaatagacgaagttaagtttgaaaggaagttgaccaaactacgctgccttgacttgcggtacaataatattaaagtcatgtcggatatatgcgatttgcaatgcttggacagtctctatttggcagggaataaggtcaaaagtttggcggggcttgacaaattggaaaatttaaggattttacatctgcggtttaatcctttaaagaaactcaatgggttgaacaagaataacagaaaactccaatacattaacttgcgaagctgcatggtgggcacattgaagcaaataaagaaattaaaggtacttcccgccttagacactctggtcctcaaaggcactccctactttggcggtactggtgaggatattaagggaggtgatgacgatgaagaggaggaagacccagacttgaggatcgaggtgctggcagccgtgccgcgcctcaagaagcttaacaagactgattttactgatgaggaaagggcagaagccaaagagctgatagcgcagtggatagaagaaggtgagaaggaggacgaagaagaagaagaggcagaagacgaagaagagaaagagggagaacaggaaggagaagagcaggagaatgagaagggccaagaagtagatggagaacaagatattgaggaggatgaataggtacagatccaactttgttggataggtatggtggcctgcgcctgaaagtgtgcaggcggagtttttaaaatagcgatctcaagctcacatgctgctcaagcacatccccataaacaccactgctacatatggtatcctcttacattactttaaataattaaataaatgttatagtggaagga

SEQ ID NO: 552 - DNA, 4278 bp, Plutella xylostella
tagttacccacgcagcttagagtagtaactagtggtggtagaccaatggttggcaagcggcgccttcagccattctaccataaacagcgcgcgcgagatgttgacataaccggccgttaacgatcgaattcttttttcgatttatttttattcgtcggtggccagtgcgcgaacttgtttataaatattcatctcaaggcacgaccttcgttttacgtaatttctctgaaatatctacagataggttcattccatagtactagtgccttgtcatagtattttttttctcattctcagcgctgtgtttctcattgtgtggtaacgaagctagatgtgacaaggttcctagccgctgactgataccactgtcgatagtacgtcggtacttcaaacgctagcgtgcaattaaaattgttccgcttcttgaataggtgtagtgtagccattttctaagggactgtgcgcattgcgctcattatcgtgcgcttttttataatacttaacggtaggtttcttaattgagaatttcttacttgagtgagcaaatttgttactatgcacattgttgcaaggatgcatatttatttagttaaattaaaaagtcatggcgaaaacgtaacctaagaaaaaaattattacttccattgcattagtaggtacattactaggtatgcaaggtagttgcaaaacgaggattttttcagtcctaaaagtcatgtaatattgtactagtgatctatataaataccatagaattactcctctatcacttaaaaaaaattgtgtatccataccatatacctaacaccctgtacctatatccttacgtctgttacgtgtacagtagacattgtccgtttcgcatatttaggtacaaggtttagtaacttgttccagccgggccatctcgctctgccctttgtccctttgtatgtgtctgtatcgctttgtttcacggtagaagctgcctttgtgtatcgttcttcatttgctttattctttgttaaaaaaataccacgtcagttattttgtataggaaacaccacacattattttaaactgcgtaaattaccgtaggttcgtacgttactattaccgcaatattttgcaataaactataatgataaacaccgctcaaataacaccataataattgccctagcaacgtgtttgtacttagtggatgtagtcagtagcggctcgcacgaattacgagtgcgtggagtattgacggtgcgaatccgtcggccggagccggttcccgcacgtgtgttgttctccgccagtagtcggggagacgccggccgacgctcacgcggcaggcaggagaataataacgaccacgctttgcatttatacgggtatcttcatacgtttctgaacgcatttaggtttgttatgcgacacaagcgccgtctatccgatagatacaaaactaataaattcaaaaaaatcagtttggtttgttgtaaatgtcaaagtgtagcgtacattttatatgaaataaatttactaaacattgcgtgaatttaactgaaagtgaaataaacccaaccgatatattatgaaaaatatgttctaagtggtatattgatatctatctactttgtgatcttgtgagacatggatcctttcactcagcgcatgttagaaagagcgagggctaggcaggagaaaatcgaccagaaacttgcaagttccgggcaaaaagtcccgaaaaggaaaccactgactgaaaacatagctaatttgaaaactgagtcgccggtgaagtccccatccaaaccgagcagggattcaatatcctcacccaggaaatcagccatcaaatctgactctccggttcgttctcccagtcgaagaagcattcagaaaccagaccaaacatcctcagttcagaaacgcaatgaactaacagtgacaaaggcaaagcccgacctggcatcgcctcagaaacgcaacgagtttattgtgactaaaaaggagtataagactccaaagcgagcgagctctggtcgtcgcaactccgatgtgtccgttgagatcaacattatgcaccgtgacgacatccagattgaagtccaagtggaggagagggacgctcccatgagtgtagtctacgactcccaccccggcagcactagccatgtcattgtggaagaaattcatgaagaagctccaaagaagttgctagaacgcgaggacagtgacatgtcagagcaccggagcgagcgtgccggcctccgacacaacatcaagtcaagactggaccgactcggcatcctctattctgacaaagctgacctctcgtcgcccatccaccgtacggagcaggagttcagctcggccacgccgcccgccacggagttcgagaagcaaacgccgcggccgcgcccccccgcggaaggagacgccgcggccgcgcccccccgccgagggcttttcctatcacagctgacccacaaggaccgtgcaacgaacgacagctgatccacagggaccgtgcaacgaacaaagaggaagttcggccgcctcgccgcgctggcagaccagatcaacaactgggaggatgacttgacccaccatggccaaccggagccgactaaaaagaacaacaaagacacgaaggccgagtctccttccactccaaaaagttttcgttctttttttaaatgacttctcagacaaacgtagcggacaaaaaatacactcgacgtgtccatacattccctacactctcgacgtgtccatacattccctgaaaagtttcggttcttttttttaaataaacgacatcaacaaggtgctacagacaactactaagtgtaaagagagcccaaaaccagtcaactctcacacatatactaaaccatccaacgatgttcacctactgaacagaaaagttatagcagaacttacttgtgagtttgttttgttttattatgaataagtacttttttataaacgtgtagtgacttctaacgcgcaccgccttgcgcaaccattgtgatgcaacttcttctcacaccataacgtgagtttgttttgtttttattatgaataattttaaaattagtacatattttttataagagtgtataccgacccaaaaccggcgaaaccagtcgcgccagccccctccacatcaataacgcagaaggttaactggaagatagtgcgagtttaaacgatggtgtattacaataattacgaacatccttcctggatgcagatgtagataaaatggcttgaccatttatttaccgctttgtgcccttatctcgtgtgaaactgtgtagtttagtgtcataaactcataaaataccaccagaaaggaaactcacagagcttccgaaacttggtcaccggtgcaactcgaaactatcaatacccgaaatgcacgcacgtgctcacccctcaccctcacgccgagttgtccaatcgtacagaggaggtaaatacatacatggaaataagatagagtgtcacgaacacagagccagatcagaaaaagctttatcccctgtattaaaaaacgaagtctaaggcgacggctaccggcgcgtctccgccggccaatcgcggctcgtttatgatttctctacgacgacacccgaccgcgcccgacaggagccgagcgcgactacccccagtgcggcgcggacccccaacatggccgctctcgtcgccgccccgccgaccgtgtccaagaagccctccatcaagaagtacaaggcgcccacgccgccccggactgacccggctgacgagaacagcgacgctgacaaagacaaggagaacaatgtcctccagcccgaggagaaccgcaatgacgacacggattgtgtacaaacaaagccggacgagggcaaagcaccggaacagggctcgccggttgtaaagcgaatggcgccaaaattaaacggaaacgctgataggagttctgtgctgtcgcgagcggcgatgttcgaggctggcagcccgagggccaaggacccagctgaaatgtctctgagggaacgcaaagctctgttcgaaaaaaataagggtgtcgctattgtgcccaaagcaccgttcggacaggccccctcggccaaggcgctgcaggggaacaacaacaaagccgacccaaaaccggcgaaacctgtcgcgccagccccctctacatccaccagtccagctccagaactaactctaaagagaacatccccaacaacagctccagaactaactctaaagagaacatccccaacaacagctccagaactaactctaaag

SEQ ID NO: 553 - DNA, 2189 bp, Plutella xylostella
attcgtcgcggaacctttgccgccataacttatcgcttccaattttgaatgtcaatttaatttggaataaaattataacgataaaaatatctatgagcgtctattgtcgtttgttttttctctgaagtgttttgtgttgtgtttggcatttttctctgaagtgtttagtgttgtgattggttggcgttttgttttgaagttgattttgataagtcaaaatggcgccatctgttagcgtggcgcagtactacgcgggcaaaaatgtcttcatcactggttctacgggattcatgggaaaagttcttgttgaaaaactgctgagatcctgtccagatattgggaatatctatttgctattgcgaccgaagaaagggcaaaacagtaaagagcggcttgatgactttattaataacagggtattcgaccgcctccactccgaggctccacaccagctctccaagctccgcctagtggctggagacatcctgcaggcggggctggcggcgtcggctgaggacgtagctgagctgatgagggagacacacgtgctgttccactgcgccgcttgcgtcaggtttgaccagagtatccgggatgctgtaagactgaacacagggggaacgcagaaaatattatccctggctgaaaaaatggagaaacttgaggtcttcgtccacgtgtccacagcgtactgccgttgcgagctggacacgttactactgccgctgcgagctggacacgctagaggaacgtctaggaggagcgtctgtacgggtccaagcaccagccgcgccacgtcatggacactgtcgagtggatggacgacgaggagtggatggacgacgagttgcgttgttctgctgaggcatttggagcccaaaatatgaggcatttggagcccaagatcatcgaccctcaaccgaacacatacgcttacacaaagtcgctcacagaagagttggtctcacaatacgcgggcaagttcccgattgcgattgcacggccatctattgtgaccgcgtccttaactcacagaagagttggtttcacaatacgaggggaagttcccgatagcgatcgcacggccgtctattgtcactgcgtccttcaaagagcctatccctggctgggtggacaatctcaacgggcccaccggtctgctagtcggagctggaaagggagtgatccgcacgatgcactgcaacgcggactacaaggcggacgtgatccccgtggacctcgtggttgactacaaggctgacgtgatccccgtggacctggtggtcaacgggtgtattctgctcgccgccaccaccgccatagacaagctccaacgggtgcatcctgctcgccgccaccaccgccgtagataagccagaacggctgcatcctgctggccgccaccaccgccgtagacaagccgaaggagatccaagtctgcaacatttccgagtcaggattgaacccattgacttggggaagagctattgacatgggtcgcaagcacgtgaaagactacccgttctccgtgtgtctctggtacccgggcggctcgtgcaagagcagctggcttcagcaccagctggcgctgttctttacgcatctgctgcccgcctacttcattgatttgatcatgtatctgactgggaataagactttcatggtaaagatccagaagaaagtcagcatgggcctcgacgtgctccagtactacaccactaaggagtgggacttcaagaatgacaacttcctggcgctgaggaagagggtttctaaggaggatgataggtgtctaaggaggatgactgcgaggtgttttacacggatattaagcaaatcaactgggacctgtacatccgtgactacatcaagggagcccgagagttctgctgcaaggagccccccgccacgctgccgcaggcgaggaggctgagccgacaattgtactacctggacctagtcacaaagataatgttcgcagctttcgccgtgtatttcgtgttctactacggcaaaatgctactgagcgtaatgtaaatttttatttgatattttgatgtgattttattattttaagtagagcatagtttttaattttacttatgaatttaagtcaacacttataccaatcaataaatttaaaatgtatattttaataaatgttaattttaaatgtaaatctaaaaaaa

SEQ ID NO: 554 - DNA, 2625 bp, Plutella xylostella
tgctttctctatgagattcatccacaatgttattttgaatttttacgagtttaaatcatagtttttaatagttaattattcctttattagtgataaaagttttgtaaatgtgttataattatgaaataagagtttacaccccctcaaacctctaatgatggcaccaggacaaaatataatatacaaaatagagtacattaaagatgttttatactttgcgataacaagacatgataaagttttaaacaacactactgatacgcattacttttcgattgatcatgaattaatttatgaaaactactattctgatttcggccctttaaatcttggttgtgtctacaaatattgcacggagttaaatgaaaaactaaagcatttattaaataaacaaaaaatagtgcactatacatcagaggatccaaggaaaaatgccaacgctgcgtttttgttgggctgttttggtgtactatatttgagtttgccgccaaaagatgcactaagaccactcatctctcatgggcagtcatatcggccctttcaagatgcaacgcaaggtgaatctatgtatactataaccatattggactgcttacaagctatcaaaaaagcacgggagcttggattttttaactttcaagattttgatcttgaagaattcgataaatacggaaacatacaaggtggagaccttaattggattatccctgataaatttttggcctttattggaccagttgactgcagtatatcacagttttcgttttaccataacccacaaaagtatattgaatattttcttcagaacaatataggattggtgatacgtttaaacaaaaggttttacgatgggaacgtatttagaaataaaggcatagctcacctagatttatttttcccggatggttcatgccctccgcggcacattttattcaaattccttcagataagtgaagaagtcaactgcgctatagcagtgcattgcaaggtctagggcgcactggctcattaattggtgcttatctgatgaaacactaccgcatgactgcccttgaagctataagctggatgagaatatgcagacccggctctgtaattggccatcaacaggattggttacagaaacttgagccgtggctgatcaaacaaggcaatctttataggcgaaaaattgattggaaactgcgaaaagaatcatggttgtgttcggatcatttcataccaagtgattttcattcacgtgtgtcttgggcggaaatcgcagcttattaactaaaatacactgcgatttccgcccaatacacacataacaaccccccccccccccccccccccttcccctccacgacgctcttccgatctctatttatcaggtacgagtaaacaggaaacgcgtgtaccagaatgcagacgaattgccgattcacccatacggcgtatattctattgccaagaaagacttccgtcagcgggcgacgatcctcaggaataaatcaccatcaccaccgcctccgttccaaaggggcctgaagtcgtatattgaacatcctattcgaccgcaggcatccaaagtcagagaagcatctgacaagaaagctgaaaaacaccaagcagaaagaaggcccagtccatcaaagaatagcttcacttccaagaacttgagtaataaaggaaatgaaaaattatatagtcggtctaagactagtcctataggcgctggtgatcctcgaataccatccccatcacagacgtcaagagactcgaggaaaagcaatgtttcacatactaagaacctatgtggttttcaaccaatgcctccatttcatgtactgaatactcctattataaaaaatattaacgatgcattgaatactccaattataaaaaatattaacgatgccaagaactttctattaagaccatacagttttggagaagaaaaacgaagagaatcgaccactccagcaaagatcgtaacgcattactcatcaaaaccttccaagttgtgtgaaacattaccttctatagtccgtaaaccgccttcgcaaattagtactactaatgctactgctactggtacagctattcgaggactacagccaacccagaaccacagccgccgtctcggacgtagcccaagcccttcacccacgcggagtatgagtcccgtggtccgaaattcaccgtctccaatacccaccatgaatagcactttcaataaccgtagaggaaaagacaaaatgatatcttcaagaagtactctgccgtcgctaggcgcagcgtctctgggtgcgcggcgcacggcgcccggcggcggcggcggggcggcggcgccctctgtgcgctccgacgagcgtccgctagccacgcagggggacatgctcaatagcatcaagttgcaaagaagattgaaagagtctatgcaatcagatagaaactgtgcactttacaataaagataactctagcggtcccatcaagcagcagcacagttccagtcgccaggtgaagcctgctgagccctcgatgagtaaggtcataaggaaaccgaggtgaaagaaagggataggtcgtctaatataaaaatttacattggtttggtcgttattgttggtaacaggatata

SEQ ID NO: 555 - DNA, 3911 bp, Plutella xylostella
atgagcatgtaccaccatagtgtaccacaaaatgccatccatcatccgcatcatgccgcaaaatacaaaataaacattaattccgttaaaattaacaagtaaatgtttaattgaaaataaaaaagtggccccacgacggcaaaaaactcaagtatgggaggcgaagctcaccaagctaggccagcgccgcttcctgagagtactcgacaccgaagggtgtaaaatacgtcatggatgtcgtcactaaagaaaaaaaacactagtcgctagtcgtgtaaaatcctaaattattgcaagaactgcttcataaaaaacatggtaaaattatagttaaaaatataaaaacatggtaaagtttctaaattaaattactacatttcgaaattaaatgaattattttgattcccgtaacatcaattaaaattatctttgcaaaacaaaattctaacctacaacataaccaaattaattaattcaaattctaaaaaacccaaacaattcaatccaaaatgattcgcaagaaacccaaaaagcgcccagttaaattaagatcagacatcaaccaactaggcttcacgactgactgctcagctaagagctcgaccagcatagaacatgtccagtttatggagacccccaccaccagcagcgactggtgcagaggggggtcagacgaggaccggtacctcttcaagtccagactgactcccaaccgcaagttcgactcatacgtgtcgtttaaacttcatgatgagaagagagccagaaagagaacgtcagtgagaagacattctagtgtgaaggtaaaaccacccccttcgcccccgccacagcagttgcccaatttcccgttgctgaatatttatggacgatgggaaccggtgaaagaccccaacgcgaccatgaactggaaaaccttccatcgtttggatgtgataaacaaattccttaatactttggaatacgagtatccgtctacttgtagtgtgtacaatatcgccaccacggctgaaggcagacaggtcaaattgaagtaatcttctatttattgaaagatttttaataagaaaattcccagtatttttttttttttttttttttttttttttttttgaaagatttttaataacaaaattcccagtaaaattttccgtaaggcagaattgataagtattgtagacattgtgacttgtcttgacgatcggatggagcagtggttagttctgactgactactttaccgaggatcacgggctcaatcctcggccagggcaaatataaacagaattcgtatatattattttggtgtgatgtgactgtgtgatagatatctctaacccaaacgggttagagatatctatggcttagtttaccaagcgtggtcgttattgctataatctccaagctccaactgctgtcaacaaatgaatatattagtacgtagacaaatggcatatttattttccagcaaaatgaatttcttgcaaattctcctaactacgaggtacagaagtccaggaatattcctaagtcataaagcggcgatatttccctgataaaaatatctaacggcatagtaggtaactacggggtctggctggatgccgggatacatgcgcgggagtggatcgggcccgctgtgtgcacctacgtcatcgaccagattgtacggaactaccagaccttaccgtcctattttaagaacaaagattggtacatagtcccggtgcagctatcaacatatggaaggaggagagcagcagtgtggacatcatggtggatggcaagagggctgcctccgtggccggtctgctgcatgagagggagatcgcctactcggtcgccatcactgatgtcggcaaccgtctcgacagagaaaagaacaaggagttagcaacgcaaactgagaataatagcactgcttctatggtgcaagaagtgcctacacagaagatggactggaccaactaccaccgtctggacgtgatctacgacttcatgcacggtctggcacaggagtacccggacctgtgcagtgtctgtgacatcggcatgaccagcgagggacgaccaatcaagctactaaagatctccaacggcgagccgaccaacacgggcgtgtggctcgacgggtgcatccacgcacgcgagtggatcagccccgccgttgtcacctacatagccaatgaaatagctcgagggttcgacgaacatccctgccacttggccaccaaggattggtacttcctgccggtggtaaacccggacgggtacgagtactcgcacacgacggaccgcatgtggcggaagaaccgcgcgcgcttcggcgagtgcgtcggcgtcgaccttaacaggaacttcagtctcgggtgggccccagacaagaaccagccaacacacgccaactaccgcggcccgcatcccttctcggaaaagggtggggagagaaagacgaagaaggctcatctactgatccgggaaacattttctttagaggtcctgcaccattttctgaaagtgaaagtgctgctattagagacacaatactgagtgcagagaagccgttctgcatctacctgtcgttccacagctacggggaggtgatcatcttcccgtggggctacacggcggagccctgccccgactacgtggagctgctgcagggcggcagcatcatggctaaggcgattttaggcgcacacggtaacacatacaaagtggggagcacaaaagaccttatgtacttcgcctcagggaccagtgttgattggagctacgccgtcgccggcattccctattcctacatggtagagctacgggacaagcataacaggtttcttctgccgaagaacgaaatacttttgacgtgctcagagatatggcatggcatagacaaactgctggaatacgtggataatagaatagagaatggtgagctacacatttgtagctgcaaggctcctccgggccccaataagccaaaagagccagtgacgcccagtaatggacgcatcaccctgggtgaactccactgctccaaatgtagaaaaagataaacaataaaccaaatgattaattcacagtaaaaggcagagtccatcgctgtacgggacatgctatcgtctggtagcagagtctatcgctgttcgagacatgctatcgtctggcataccattttccgtgtacatatcgatgcatagttttggacagttgattatgttcccgtactcccacactcggcagatttgtaagaactatgtctatctgctcgaaggatccactaaactatgtctatctgcttgaaggatccacgtatatgtctaaggcaatatacgaagcaaccggcatgcagtacaaggtgggcatctccaaggacgtgctgtacggcgcggccggcaccagcgccgactgggcgcacggccgcggccgcgtcccctactgctacaccatcgagctcaggagctacgagcacaagttcgatctgcctgaagaccagatcgaggagtgcgcgcacgaggtgttcatgtgcctgcacgcgttcatgtcgtacttcgacacgattggctggcagacgaagtacatggaggaggaagctgaggaagatgaatcttgatacattgactatgtataatatactgggtgattggtgggtcgatgtattcctttaagtttactggaaataccttcctctaacaccaatttaaaggaatacatcgacttaccattagcattccccctgtaaaagtcttatgaaatctggccgccattttcatgttatttaaaaaaggttttttgttacatatatgtatactaattttattcgtattatgcagttataacattgaaaacaatattgtatggtaaatcattttatttaaatgtgtaaataaatcctttgagtattgaaaaaaa

SEQ ID NO: 556 - DNA, 778 bp, Plutella xylostella
gggcacggacccggcggcgaaggaacgacacactcacgacaacgatgttacttcactatagacaatgaatattgtggagtcagaaaggaaaaaggtgccattcccagtaccttcaccatctcttgtatatttttaaaggaaataaacatttttacttttactttactttacataggtgatccagaaataaggttattatagttaaaatcgagaatatcataaataggtaattggattttaacgatataggtacgttttctgatataagttttcattattatttttgaaaattttcagttatggaaaaataaatacagaatacaaaaatatttttttaggttgagtcagtaagttactgaaaacaagttgccattctcagtaccattaaaactaaaagaaaaaccaacgccttcattaaaaaaatagcaaaaaccaattatcgagacttgtacatataaaaagaattacaggcactacctactttttaaaacgccttcatttaaaaattagcaacaacatattatcgagacttagtacatgtaaaaaaaaatacaggcactacctatttttttaattaaatggctacacaagacaagtataagacacaaaaaaattgttttaatcgcgaagtttttttttggtgacaaaattaatggatacctatgaaagtaaccaccagtcatcgttaggtaaagttattgaaactggcagtaagttacccgaacttcataaccaacactggctacaaacatacctagctctatctacaaagctacaa

SEQ ID NO: 557 - DNA, 2945 bp, Plutella xylostella
cgtcgtgaaacgatactttcttcttgctatttctgccttagggtactgcgggtacccttctgggtttttccagtaaacctggggtacacaaaaatggcagacaatgagagtgcgaagtccagtgctcaaccgtcggtagaaagcaaacattcggtgcaaagcaaactcaagcagtttgggataaagatgaaagaatccgaacctaaagaacgtggccttatgcgctggacctggacgggcaaatcaaatctgtgaatttgacaaattttgacatttttctttttaatttcgagtcccctctgtattaattccgtaccctttattttttttttcgtccgtgcactgtttagaggcagacgtgtacaagtccacgctccattttgccaatcaaataacaatcttaagcaccaagtattaaaactcatttttactctgtgctaccaaaagtgaaaggcgactaattaatcgtgccataattgctgtctctgtctcgcgccgcttgtagcgtccgctacgcgccgggccgttatcagtgctacgccgctacgctactgctacgaagtcgctgcattccattccttggtatcgctgcctactgcctactaaaccatcttaatcacctgaggatcccatgaagagccaaaccgcctacctcgatgtggttgtgcctccagacatcctggactacccgacgagcagcgaccaggtggctcgcgagggcgccaacgtgtcgctccggtgtgcggcccacggcgtgcccacgccccacgtggtgtggaggaaagaggccggcgacctgctgcccgccgccaacttcagcgacacactcagtaaacaactttgttcactatgtctaaactgactaggacacccccacagattaacatctcgatgtccgcttctaatcctgatttgccgactagcgaaaacctgcgctgtgataagagacgtcggctatcgggggacgaacgtgatagttcaacatcaatgcagtgtgagttgcaaaaattgtttgcctcactcgaattaaaactgctgcacagaattgaaactatagaaaaggatgtcagagaaataaaatgcatgtcgacaagttcccaagatagatcagtgagcggcgccgtgctgcacatgacgaaagtatcaagactgcacatgggcgcgtacctctgcatcgccagcaacggggtgccgccctccgtgagcaagcgggtcatgctcgtcgtgcacttccccccaataatgacaatacagaaccagctggtgggggccaaggagggtgactcggtgcacctcgactgccactcggaggcattcccgaggtccatcaactactggaccatcaacgaccagatcatatcacagtcggacaaaaggtttgtgatcaccgctattgaaaaaggctacgaagtggacatgaggctgaaaatcaagcgagtggcgcgctccaccttcgggacctacagttgcatatcaaaaaactctctaggagacacagacgggacgataaagttgtattccctgtctgggaaatttgatgagatgatggacaacgagatcggcgagttcgacgagacgcctgatgtgagcgaactggaggcgctcaagcgaagcggagcaaacgcgctctacaactcgctccctctcgctgccgtggccatcctagtgctgttataatacaccttatatagccactttgtatatagacgataaaactaaccaagccattgaaaagtccatttcattcgtaactaatcaactgactgcactggaggacaaaattgataagttggaagacaataggaaagtaatctcgaaggaaatctctttgcttgacagcaaatgtgagaacatggagaggatcatgagaaagtcatgcattgaaatccgcaatgtgaaaatgacggaatactggctcatcagtgccccgggcgacaagacctgccagcagacctgggacaaatgtacctaagataaaaaacgagaagctcaacgacctatttaatatgatatatacactgagcgccaaactgggtcgtacctaagataaaaaatgagaagctcaatgacctgtttaatatgattcatacactgagcgccaaactgggactaaaactcgggaatagcgacctgcgagatgtgtaccggatcaacaacaaagctaataaagatgtctcctctgtgatatttgaagtatcaaacaccttattgaagtcgtgctttctggaaagtgcaaagaaatggaacagatctggaagtgatcaactgaacagtactcacttggggctgacaggtaatgtgaccccaatctacatatctgagtgcttgacagctagagctaaacggatccattacctcgcccgggactttgctaaaactcatagttacgacttctgctggaccagcaatggtcttgtctacctgcgcaaaaagtctggcgacccctacattctaattgcacatgaagggaaactcgaagaactaaaatgactacttctgaacagtttgagtttgtatctaccactaattatacttaaggctactatgatgtattcactaccgtactcagataacttagttaagatgttggcgtactcacataacttagttaagatgttatctatatacctacttgcatgcataaaacttgttttgttatataaaattactttcaacttatgctctactcacaccaccaacactcatcctactcttcacacaaaacctcaactccacactgacattaaccagtcactcacaccgaatatcatccccgaacacacacacaaacatccttccctttataccaaatcgcatctcacacttcaacaaagtgcacatccgcaaatatataggcaccactcgtcatacgagcattacactgttaaacatactaatctggaatatgtttattcttttataaacatacatattttatacataca

SEQ ID NO: 558 - DNA, 3125 bp, Plutella xylostella
acagtcattacttactcaagtttttttctgttgtttcagataagctgagggcgtcagctgaattccctgatgcattaacacttattgacgaaaacataaattgcgttgtcctgaaattgtgtggacgaatgaccgatcgctcgcccaaattacaccgccaattcaatagtgcaactttatttataactgtattgtcaagcccacatgtactcttaattagcttgcccgataacgtagccgaaatcattaaaaatttgtttgacagtgcagcaaaaattaatttagattttatctgcgaatttgcgtgcgtcacaacttgaaggttgcaagtgcctgcgcgtgcgcttgttgcaaaatcgattctaagtggtggcgatgaggttgagattgttgcaaatttgatgagcacattattctgtaccgaatatgtgagtcgagtgaaacccacgcttgggctaggggcatctttagagcagtctgattcaggcggcaatccggggcgggtgtccaaaaattttcaaagatggccgctgcgaattccgaatttgaacttttgaatttcgaacggaagcgagggcggaaacggcggaaactctgggcggcggggggtgtcgggtgaaatgcagttaaaagaaagtgttatctaacaaaaaaaataaaatcgcggttgcaaattgggataagctgagggcgacagctgaattccctgatgcatcaacacttattgacgaaaacatacctaaattgcgttgtccccaagcattttgaataatgtataaactttccataaaggcaatccaaaaccattgcgattaggctgaagataataaaatcgtgcaatgggactacagtgtattcaaatattgtcaacaagtttggaaggtgacgcatggccgagtgattatggcatacgcggctaaagtggcggctttagtttgtttatgtccatgattactatttgtttgacttgaatgtgagacgttggccaatatttggtaccctggcggaccattacgtttaacatcttcttataaatctaagtgcttaacagacaaaagatgaactaatagaataatctagatattttgtttaacaaaaggctccgttttcattgcagatacgaggcgacacagccatttcaaaggcttcaagacaatcaactttaaattctcagagaaggtcttacagaacgaggtgggggaggcggtcttgagtgtccacgtacaggagttggactcctaccggaatgtgacaaatctagaagacttctacacggtgaaccttcaagtgagccgggtgacgaggaacagtcaggggaacaaggcgtctgtgccttacacggagaacacagtgaagatgacaaaggaagagttgaggaaagggaagtggctgaagataaatgtaacaaatatggtggctgagttcttcaggctgccgagggagtatttatcagtgatcgtgagagtacaagactcaaaaggcaggatgaacttggtcgtgccgcatccgagctcagaaacaaacaatgctttgatgccctacatagaagtatttctgcgggacaactcgcacaagcggacacggcggactctcggcatggactgcaccgagaactccaaggaggccaggtgctgtcgataccctctcgtggtcaacttcgaggagttcggctgggactggatcatcgcccccaagcagtacgacgctaactactgcagtggggagtgcccgtacagtttcctgcagaagtaccctcatacgcatttagtccacctggcgtccccgcagggaagtggcggcccctgctgtgctcccagaaagatgagcagtatctctatgttgtacttcgacaatgagttgaatatcatctacggcacgatcccgggcatggtggtcgagagttgcgggtgttcatagcacccgtgtcggtcccggttggtcccaatcttcacttttgttaaaatcgtttctttattcaaaattttcttcttcaagtgtttttagacatttgtttttcttgttcaaattattgtgaaatgttgggaccagaggtgttgtctttgtgatatcttcggtgtaagactgcaaaactcttgtgtgtttgtgtgtgtgtgacaattgtaaatttattctacttttgtacatctagtttcaagtgcctgaacattacctgcaacctctatacataagattactaaaatatattgacttaaggttcatccacatttcataaggatcatttcaatttgtcatagttattacatagtgacctacataatattatatatgtttctataatttagtacaaaaaaatccataacattggtttttttataaccatgtgaccttttagagttcagcgataatgcattatctatataaaatgtatactgcaatgacaaaaatgactttggttataaagtttcattcgtgaggacattcaataaatataatcagaaataatatacttctaattatccatcatcttctagatatattgtattttttttcattaaaagtcaggttctaaaactgtttttacaacgacatcctttttttttaaatgtggcaggtgcttaacaaagtaaagcgacattttttgtatttatggaattaaagtatggatgtaattgaacctatctttattataattttactcttattccgatgtattacttcagcgtttaaaatatttttagatacgtttttattgtaataaatttagcgaaattttaattttcaaaaacaagatctcattttaggcaatcatattcttgtatgtataagtttgcctatagatctctaaactttttgggttccaaactgtatggaacacaattttttggatggaaatgcaaaaatattattattacttacaacattttagaatttagattgaatgttttatagtcagctgtcgtaatttgatgatattcatagaaaatttaatcaacaatctcatttaattttagatattatggaataaaactctcaaagcataaaaaaaaaaaaaaaaaaaaaaaaataacggaagagcacacgactgaactccagacacgagaaggtatctcgtatgccgtcttctgcttgaaaaatggggggggggggggggggggggggggggg

SEQ ID NO: 559 - DNA, 843 bp, Plutella xylostella
agaaggacacataaaaaaacagttagtatataacatactcgtacaatagttaacgtacataattggcatggatagtataatcacagtacatactttattatttttacgaaacataagttgtaagtattagattatacgtaggtatctctgtctcaccgaaataaaataataaatattttatctaatctttataaggattgacaaggatctcgttgtatttacgaaaattggataaatccttttaaaattcggtcgaggtcattgagccatatcttaaatattaaaaaagattatcccttatcttcgacattttgcttttaactttttcttcttcaattttattgatgcctgtgagggtgatgaagccgccatttattttagctttgctgtagtttattttaaccagtgagtgttaactccttattatctatcagcttagcacgagggaaagggattcaagcatctgcaagtgtagtttcattcagttataaaaaagttaaaacatataatattatataaatataataatattatgtaaatatacagggtgtcattttcttagtgacgttcccgttaccccagctttgtgtccaaacctatctctgatggatcacatcaatgaaaataacacttatggccatatcacagtttctttgcacccatttttcagcatgagggaaagggattcaagcatctagccggcctgtttttcgatatgtccaatgtgaaagatacgttcaaagtgatctacaataatattggtggtggcacggataccccgcggcgcgcggaatacggtggccgcctctctgtccaaatgcattcgacaaacaatagaaacca

SEQ ID NO: 560 - DNA, 644 bp, Plutella xylostella
taatgggtaggtacctatagacacactttcttctttcgagtgactcgtgttcgaattggtgtgacatcgccagacctagacggcccgatggtgtagtggttagtgattgactggtttgtcggaggtcccaggttcgaaccgtgatcagggcagatatttcgtcgtcctgggggccaaggggtcaagccacaaattttatgcaaatgagtcagtgcaatgatgcagtcttggaggaggccccatgtcatgaagaggtgtcgtgggggccaagggaatcaagtatttttttttatttaaatgtatcagtgcagtcttggcaaagtggtatattacaataggctgtgcttttgcgtaagtttgcgtgtatattacagaggctgtgcttttgcgtacatttgcgttggttctacaaagccggtgtggtggtgaacctgaaaaatggacctgaagtggagagctttgaccgttacattgaagaagccggcaaaactcgcttaaaaatttagataaaattaatctccattacccctggtcagacagacagacctataaaccaacgcaacgtactaccaacccccctatccattaggtaccctggtcacagacctaaccaacgtacctaccaacccccaaatagcaaaaga

SEQ ID NO: 561 - DNA, 832 bp, Plutella xylostella
taagtttgtggcactataagttggttgataggttgatacacagagagtaggtaatatagttgatagcatgttgactctatggttgataggttgatacacggttgatagcatgttggtagaaaagagtgctatgtataaataaatttaaattaaagaataaattcgatattaattcaattacctatatcctgaggctatacataaattcttatgttaagagcgctcgtcgagatataaaattttagtctacgggtcttacttctatcacactttaaaaatgcatcgaatgccgttagctttttacttgatctcaataatcgctcttggatattccaggccaaccgaggaagatgacttcgtgagctgtattgacgaaagcagctcctcttccgacgtcagcgaagcagatgccttgaaaaagttcctctactgcttctacaagaagactgacgtcatcaccggcgacggccacatcaagattgataactttctggagaagcttccagaaaatatgcattcagagaaagtgagggaggtgctgaataaatgcaacagtttgaaaaccgctagcacgccggagcaaaccgtcttgaatatattcacgtgtatccatgccgtttaagatttaatccttgggttttaaaaaagtattgctggcttattttgttttttagtttggtctcattcttcggattgcatggtaatgaaggattatggaggctacaaaccaaatattggactgaatttattttatttatgttttgcgcacgtacatacagaataaaattaaattattatgatgtgccacaaactttatgactgaataaaatgg

SEQ ID NO: 562 - DNA, 2220 bp, Plutella xylostella
agtcaatcattacgtgatcattacatatcataataatattattcatttcaatagctttaaatttgtagatggcaaacttaaaaaacatcaaatgacatcaaacttcaatctttcaatcaatcattatctaaatatttttctttaaattaaatagcgttaaatttattacatctttaaattaaaaagcgttaaatttattacagtataaaatactcaatttacttttataagcaacatgtcggcaccctcacctcctaaggactgtgcccaactatgtatggacattggggctttcaaaaagtccgacaaagatccacaaaaaatcattgaagaaaacaatgagagaaatgcaaacgcaatatctcctgctatccaagctttcaaaaagtctgacaaagatccacaaaaaataatcgaagaaaacaacgaagacatgagaaatgcaaacacattgcctcctgctatccagacaccaaaagaaatgcaaacacattacctcctactatgcaaccgcctagtacaccaggtgcaccaaactacccccttcatgagggattacagccaatgcctgctgaagatcagcatctaccggtgcctcctgaagatcagcatctgccgcagctaacagctgaggccaggtcctgatggcccccgacggcggccgtggactggacaaccgtggactggactccgctcggggacctcacagggaccagacccagggtcagcaaatattcaaccagcaggtactctctgagcgagtggaaggcacacaatgactccgtcttagaccccacaacaatagttgaatctaacatcatagattacaacgctaaaactgccatgatgcaagctttcggaacaatcgacaaacagcagaacgaaaacaacaaacgacttaaacaaaaagcgaaggatatttttaggtggaaggttgaagtcgaaagatccgtgaaagcaatcactgaagaagtgcagctgttggaagctgaacgacaacgactgaaaggagctgctagagtgctgatgcttcctgaatctatttctaaagaatgtctagatctgcgatcaaacagggctattccagacttagtgtcagatttggctgaacaagaacttatcaaagaaatgaaccttgtaactgatgtgagagatactttagaaagaactttgaaaacaattgaagaacagctgcagattaataaagcggctaaacaaaagatcgagtacgatttctgtgacaaacagatggcgtacaatacagaagtgaccaacataggcctcaataccaaatcacccacgattttattcagaccaggtgcgacgagatttggggactttacagcgtctgtagagtactgggaattcttctgccgagagaccatacaggacgttgaaactgtcagacaaagatcgatcgatcttcgaggaagcctcaacgctatcctcatcaacaacggtagaaaattaagaacgcaagccgacaaaaccgacatagctatcgctgaaactgtagctataaccacagagctactcacaaaactggacaaaaccctttgagctactcaccaaactggacaaaaccctccgcaacacacttcaaaggattgctgacatggagtccttaatagataacctcaaagcttcggtgcgcaaaatggacgcagcgatgaagctggcgcagacgagactagacaataggaacaactggaggcctcacggagaggcctgcagcaatgaagctggcgcagacgagacttgacaatagaaacaactggcggcctcacggagaggctagctgtgagggaccaacctcatgtgggcctcatcgaggaagtgaagaagatccagtgagggaccagcctcacgtggggctgatcgaggaagtgaagaagatccacgggacggtgacgtcactgctggggcagctgaagaatgcagagagagtgaggacagagctgatgaacaagaggacagagttggagaatgacatcgcgtcgaagaagaagacgttgaacatagatagggacagatgcggcgtgatccggtcgcactacccctctgcgttggaactagcaggctattgatggtattggggatgatttgggaaatgcctcgaaataattatgtaggcggagacagatgcggcgtgatccgttctcactacccctctgcgttggaactggctggctattaagagaattggggatgatttgggaa

SEQ ID NO: 563 - DNA, 649 bp, Plutella xylostella
gtttggttagaagatttgtagatttgtgactttattaattggcacaatggttgtcattacttagttacttatttaggttttttgctttgttttcgtatgtgacacaccatcttgttcaatatattgttaatctaaggcataaaagtataggcgactaggttatttatgacgtgaggcgttataatgcgtgagaatattgtagctagggaatgtccgaagacggctagggttgccaaaagtgcaatcatgaaaacaaattaattttaataccgttttatcacactataacgtaaaatgagtaacttatttatgtgtccacggatgtgtaaacgcaaatcacagcggttgtatattgttaatctgcgagttgacccgaggtaggtcattcgcttgtcgtgggcggctgcagcgggctcacgccggcatgtcacgactacagctgatgcggcatgtttagatgtgcagatcttattgtcccccggtgatttagagaaacgatttaaaagacgctgtttgtgttatgttaaactttaaagaaacaaataaaagaaaagataaagataaagataaagaaacatttattcgacacatagacagcaacaacaacaaaaagaaaaatacagacttaaagaaaagaaatacatacaca

SEQ ID NO: 564 - DNA, 2105 bp, Plutella xylostella
gcttctacaaccttaaaaaaacactggcccgacacagaaaaccgacgaaaaaaaaccacaaaccaccctgacattccctgtaaacacgatgtgaaaactgaaatttgtgttgtcaccgcaaaactctgaaatttacccacgaaaccggcacgaaactgtaaataaatacgcaataatgacaaacttccagtctcctattcccgtgtccgagatagagtcggtgctggcgtgggtggactccttcaagctgtcccggaccaccaggaagatcaatagggacttctctgatgctgtcctgctagcagagatgctgagcgtccactatccgggcagagatgctgagcgtccactaccccaagctcatcgacatgcacaactacccggcacgcaacagccacgcgctcaaacttaacaactggatgactctcaatagaaaggttttgaaaaagctgaaactaaacctgtgctacgccaccattaaatagaaaggtgctgaaaaagctgaaactgaacctgtgctacgccactatgctatgccactatggaacagctggctatggaacagctagccaacgccacacccaatattattgagcgagtccttattatggtccgtgagaagatcctccgtgatgaagaagcaaatagagccaaggaggagcagaacctgtcgagtggaggcagctaccacgaggctctgggggacgacccgaacgtgctcctggtcccagtgaagaaccgttccgaacgtcctcctcgtcccagtgaagaaccgcgtgaacggagtcctgcagacggtgcagctgaaggtgatcggctacaaccagtatctggcggtcagccgggagctgcaggacgccagggagggcgctgacctgctgaagcagaaggttgaacagttagacacattattgaaagtaaaagacgagagaatagaagaattgcaaaagcaacttgaaagaaaaacagcaagacgcaaagaaatagaagctttaacaaataaaaagttagatgatgttgaacattcagaaaagtccagcttttcaataccagaagtagaaaaatcatcgaaatctaaaatatctttgactaatgagggtagaataatgaatgaaacacctttgttgaagaaagtgtcttctattgctaaaccgactaatgtagctgaaaggacatcgaaacaatcagtaaccaaacttccagaatgtacatcaagaaagagtattagtcctatcatagaaccgaaagcatctataaagaatatcgataataccactaaaaatattagtcccatagaagcagaatatataccgactgttgctgacatcaaaaagagttttacaaaagcaccagttgacgtcaagttaagtatgacaaaaccaatagctgaagctagggttagtgtaacaaaaccatctgtagagatgaagcccagcgctacggcccctgtagttgacataaagaaaagtaaaacagaatcgcatttagaagttaaaatggacaatcagatccttaatgatctaccaactgtcccagcaccgagtggaatgatttcaaatacgcccgcttcaacactaatttacgtcaacgatcttacaaataaatccgagaggatgtttcctttccttccaaagggtagttacgagattacaaaaccagctgcggtgcctgccaatatcccagaagttaaagaaagtatacaaccagaggtggacagagtcaaatctgatgtgtttgaggaggccgaccaagaccatcattcaatagatgaagaaaattatgaagacagtgagaacgatttcgataacgtggtcaccgttgaacagactataagaaaagaaatcaatgatatttccaataacatggggcagttacaagaaagcaaaagtaaggctgaagttttggttgttgctaacccaccagagtgagaaagcctccaattaaataataacggaatagattggactacgaagctagtcaaagccgacgacttagatagattttgaagatactttatagtgtttacatgtaggattaaaagtcttattagtttttaaaaacatttacttataatttggaaatatacaaaagggaatgaaaaaaaa

SEQ ID NO: 565 - DNA, 548 bp, Plutella xylostella
gagcgcatgccgcaatattgtcaatgtcatcaaaatttttgacatacaaaaccataatctagtaactgaacaaaaccataccaaaatattttatgtatttaaagaagattagttaaaagctgttaaaaaataaataaattaggtacctacttaagtataagaaaatgggaaacatactatggtcgataatttggttacttattctaatatttgctggatggtggatagcacttatagtggtgcctttctatgtaattttactcccatttgcaatatgcttctcagctctttcgccattcacagatatgttgctggtaatagctcagtttcccggtctttgcgctcaaaaaatcaaggctggagaaggattttagaaatatttttgtgcaatactttgattatggtcgaagatgcaatagtgtattttataaaatgatatgtgaaagttttactaatgtatattataggtataatttgttaagttctatcctaatgtttgttttctattaaaatttgttagttagtggtgataagcaaaaaaaaaaatc

SEQ ID NO: 566 - DNA, 822 bp, Plutella xylostella
aagtaatctgaactctcacctgaacacatctaacttctgatcacactcctgtacagaacacatctaactaacaataacaatgtctttgcttccgtatttctacgactacgatttccaattcccgcgaagggctttcgaccagagtttcgggcatggtctggcccctgagctcctaatggcggccagtcccctccgccaccgcctgccctactggccgcgtctgccagccgacgtcggctcttccatcaagactgacaaagacagcttccaagtcaacattgacgtgcagcattttgccccagaagagatcacagtgaagacggcagacggcttcatagtggtcgaaggaaagcatgaagagaggaaggacgagcacgggtttatatcgagacagttcgtgaggaaattcaagttgccggaaggttgcgacttggaggccgacgcgtctgccagctgacgtcggttcttcaatcaagactgacaaagacagcgtcctagtcaacattgacgtgcagcatttgcagtctaagctgtcttcagatggggtgctgtcggtggtggctccgaagaaggttgaggcggtgaagggagagcggagtgtgcccatctcccacacgggacctgtgcgcaaggaggtcaaagaagacctgacggtcgaacccaaggatgaagggaagaaatgagttgagtgtcgttcgcttggtaatgttgagactgattaaggttatttgtatgattgcatttgatatggtaaaagatcggaagagcacacgtctgaactccagtcacagcgatagatctcgtatgccgtcttctgcttga

SEQ ID NO: 567 - DNA, 1348 bp, Plutella xylostella
tttaaaataggaaccagcaaaatgacatctgggacatgataaaatgacgtatgtcatcggttgaccaaaaaaatccaaaaattacgctgatttattttgataacaagcaatatgtataatattttgaaataagatttacatggtataacaactaaaaatgatagaagcagcgagtgcaagcgtggaaaatgccacaaccactaccactataccaaacataataaacgatgacaacgacatcgcccggccggaagcaacgttccgattcacagtggaaaatgtgagccaactgaaagagcaggttctgtcaccgcccacctacgtgcggtgtctgccgtggaagatcctggtgctgacgcgcaacaccaccaccgccgaccggcagcaacagaaggctctgggcatcttcttgcagtgcaacggagactgcgactcttcaggctggtcgtgctacggcatgggcgagctcaagctcgtgtcgcacaagccagacataccagactactccaggaaactgcatcacatgtttcactacaaagaagacgactggggctacacgcacttcatactctggaaagacttgatgaacccagacaatggtttcatcaaggacgactccatcacgatcgaggctcacgtcaccgctgaggcgccgcacggggtctgctgggactccaaaaagcatacaggatatgtagggttgaagaaccagggcgcgacgtgctacatgaactcgctgctgcagacgctattcttcaccaatatccttcgcaaggcggtgtataagatgccgacagtaggcgatgacagctccagatctgtcgccttcgccctgcagcgagtcttctacgacctccagttctcggaaaagccggtggcgactaaaaagctgacgaagagttttggatgggaaaccctcgactctttcatgcaacatgacgttcaagagtttttacgggtgttacttgataagttagaaagtaaaatgaaaggaactatagtggaaggaacggtacccaagttgttcggaggaaaaatgacgtcattcatcaaatgcaagaatgtaaattgttcaagtactagagtggaaaccttctacgacatccaactaacggtcaaaggaatgaaaaatatctacgagtcgttcaacgactacatcagcacggagctgctagagggagacaacaagtacgacgcgggcgagcacgggctgcaggacgcggagaagggggtgcgcttcgacgtgttccctcccgtgctgcatctgcacctcatgaggttccagtacgacccgcagaccgacaactcggtcaagtttaatgataaattcgagttcttcgaggagata

SEQ ID NO: 568 - DNA, 579 bp, Plutella xylostella
ccttttgtaggcgctaggctatcaacgtcccacagtgttttatgaaccctatttttgtgtcgtctcggtttttttgcagaatcttatagtttttgtcattttaaacgctttggtaaactttggtagagagctccgaagtttctatcacttctggtttatttttaaaagggaaaggatcctgggaatcctaaagtttcactttgtccgggttccgaagatcacagggaatattgttgaagtatggctgtgcgatgaatcacgaaaaatattattaaagaaaaaatattgttgaaaattaaagtgtaactgtgcgatacaattgaatttcgatagcatgcgtgtaactatgcgatacaattgggtttcgatggcatgcatggaatacacgcacatattaggacatgcattatggcaaagtttcataatattaagacatacattatagcaaaatttcatggtattgggacgtgcattgtagcagggtttcatgcatcggcatcaaatctggatggttgctgaaatattcgtattgttctctcttttcatttttgtgttttggaacccgaatggccgcatatt

SEQ ID NO: 569 - DNA, 1575 bp, Plutella xylostella
cccccccccccccccccccccccttctattccaatggtacgctgtctggctgcatgtgtaagttaagcgctcgagcgcttgtttaactattgaacgatcatacaacatctgtctacaacactgcacggcgaccaccgagatctacaccctatcctacactcttttgtcagtgtctggcaagggcaagtgtcttgcggctgtcatcgtcagtgtctgtgtctggcaagtgtcttgcggctgtcacccctacacgacgctcttccgatctctgtcagtgtcagtcaaaactgtcaaaaatattcaaattaaattcaacggcaactcgaatcttagctctaaacaacgctttgaaaagttatgaaaataatgtcaactttattaatttcgttcaacggcaacgggcaacggtcgggcaacggctcagagcttttgatttgttcggttgatttgtttgttggttgatcaaatcaaatgtaaagttaaatattttgtgaatttattcaacaataaggagcgatggatatgaaaacggaggttttggaacttgaaactaaaattataaaccacgaagcgtacgggaatgcgtcgtacaattggtccccaagagacttcgagctgggctccggtctgggtcagggcaagttcggccacgtccatgtggccagagagaagaaaaccggatatctggtcgccatcaaaactttgttcaaatcacagatcatgaagtctaaatgtgaacggcaggtgatgagggaaatcgaaatacagtcgcatttgaaacaccccaacatcctgcagctgctgacgtggttccacgacgagcgccgcatctacctcgtggtggagtttgcagccggtggagagctctacaagcacctcactaactcacccaaaggacgcttctctgaggctaaagcggccaagtacatttatcaggtagcagatgccgttgagtactgtcaccagaaccacgtcatacatcgggacataaagccagagaatcttctagtctccttgaatggagacatcaaactagctgattttggttggtcagtccatgccccatcagaaagacgcaaaacaatgtgcggaacgctcgactacctcccgccagagatgatcaacaggcaggtgtacgacgtgaccgtggaccagtggtgcatcggggtgcttttatacgagttcctggtgggcaagccgccattcgagagcgaggggcaggaccgcacgtacgctaggatcctggcactcgatatgacgtacccggagcatgtgaacgctggcgctaaggatcttatttctaagcttctacgaaccgtgagcaaagaacgactatctctagatggagtgaagaaacactactgggtgaagcagtattactcgcctagttaagatataaatgtatgtacctttctgttattttaccatttgcctgattaaagatttttataagcattaaaaatctcttatcaatgtgcattacaacaaacaaaacacgtatgaaccaaaagaaaaacaaaataatacctctatagctctaaaacaatacattatgagtacataatctgaaagaat

SEQ ID NO: 570 - DNA, 555 bp, Plutella xylostella
ttggcaatatgcacaaaggttccactcgggagagccaggcgcagtgtgatatggatcagagtaaagtaaaagtatatctgataaactatattcaggaaggcaattgcttcgcagcacgcatgaagttaaaactggattgcgaagaggaccatcgggaggtaatggcaatgagccccgagtatatagtttgtaacattgccaccttaaaggttaaagtggagatagcatcttattcaaaatatggtacacgtgaatcacgaatccacataataaatgtatcttttgagttcagcaaacgtattaaagactgtttaaactgtatgttaaatttacaaattaacaacagctcccgtacaatcatatctacagactgttctggcggatttatacaggcaccggagagttacagcttatccgacctcaagtctgggaatgtgaatgttgcaggtgtcatagacattttcatggtacccaacccatgcagtgttttgtatgacgacaaggacctgattgacttcagtctgaagggaatagatggatcagtggatttccatc

SEQ ID NO: 571 - DNA, 2523 bp, Plutella xylostella
ttccgtggatcttattctggaattcctcaactcagaataatggtgaaaattaatacgtttaggccagctgtcagcccagttttctcaagcagatttatttattatagaaattattatacctaaagcagatggtacatattcaaaattaaacgtgccttaatataatgagtgacttaggtaggcttgagtaacgagtgagcaataacagggaggtatcttaatacgtacttatacctaaaatgctaaagatttatgtcaccaggttaacccagacaagttttctttccctgatttattaggatcccaagcagatttattactggaatttattaaacttccgtgttctttccctgaattagaatcccaagtagatttatttttatattagaaattattatattttgcctttgtaagtacatactaggtacggtaggacaaatgactacatgaatccaatttgatatcctggtttcctaaagcagatggtacaatattcaaaattaaacgtgcctcaatataatgggcttgggtaacgagtgagcaataacagtcaggttctggagatcttaattacttagctaaaaatgctaaagattcatctttttgtatatttctcaatttatcctggcattcttggcttcttctatcagtcggagaatattctagatgcaatcaactactgtgcaatgccgtgcaacgggagctctacctcagaacacactttttgtctttaccctcgctaccagcccagtgcatcctgttcgggcatggtggacgccaggctgactcctgcggagaagcgcggcatcgtggggagactcaacaggcgacggagcgaggtggcccgggggctgctacccgggctcccgccacgcatcgtgctcgggcatggtggacgccaggctaagtgttgcggagaagcgggacatcgtggggagactcaacaagcgacggagcgaggtcgcgcgggggcaactgcatgggttcccgccggcggctaatatgatgaagatgagatgggtggacgacttggcgcttgaagctcagaggtgggcggagcagtgccttccgatcagtaaagtggaacagcacgactcatgccgggatctgtgtagattcagtaacagtgggtcagtgcatagcgacggtggtgggggacgctccgggactcaaacctgagactttgctcgacatgtggtacatacagcgactgcactacaagtggaatgcctccatgacctcgttgtacacaaaaagaatctccacctctacgcagattttgagcagatgatgaatgcagattcttttatggttggatgcggaaggattcgtttcaagtctctctggcaaggtcagcggcgccgagtggagcgtctggtctgcaacttcgccccgcgcggtcccacgcccgagtacaacccgtgggccgccgggccgcccgcctcgacctgccctgactacgcgagagctgatacggagttcccggccttgtgtgctttgccggactccacagaccagtactacagcatctcagaaacgtgcactgcgcacaatggcgggcgtaccttgggacaccccagcaaagcaactattcataaaactcaaaatattaacgctgccgtaccttacaaaccggctccccagtcctccacaccctggagcagggcatcctggtggtgactgccttacaaaccacctcgccagtgcttcacacgctggagcagggcatcctggtggtaacactcctggagctggcgaacaactcggcgctgaggcggcccggaggcctggacagcgtctacctggccaccatgggcaaggtggatcccgctgtcaccaaaccgtacccttatgtgccagggtttttgcgggaccttgaggatgctgatccatttagaggcgaaaatttcacatctgaaatacataaagaaaacaagtcccgacgccacataagaaatacggcactgccttcatcaataacaaactacttcgacacaacaactcctagggtgttactgccaaaggtaactttagatacaaaaccgatgtttccggaaccagatggaaaaacggacgatactaaaaaagacgagatattgaagacgttaatcgacgaatatggcaatgcgtctgtaactgctttccctaacttttgtgtgacgattttacttttattttttggtaaacatgtattgtagcttttgggcttgttttcctgcttgatgcaataagaagttttaaagagctgccagccattttgtgcatttagtcagatagagtcgtggcgcgacacacttcgtattttgtaaaaaagagttgccctgcttactcgtaatcatgtctaaggtatacttacgttgtaaaagaaaaattattactcttgatttgtttttatattcaacttaaagttttttattataatcttgcgaagcaagacacgtaacattacgcatattttattcggcacagagtaacgatacccataaataactctctgtattaccgacgactctgcaccagtca

SEQ ID NO: 572 - DNA, 522 bp, Plutella xylostella
gaaagtcgagcgatatgtttacggcatcaaatcaaacagtatgattacaaattaaattcacaagtaatttaaaaattaccgtagttaaatgcggaaagttttctcacaatttaaacttaatgcggaaggtttgctcacaatttaaacccgggaatgaattcagaacaccctcacaatgttgctcgaaaggaccactgaagatgacaaaaaccagaggtttatatgctacacagttgcattgatggttttactttgctttgtgaggctcttacaatacttgggcaagcggcgaaagcgatcaagaaacctaacagtaaatttccgtgaaccgtcattacaaaacacttccatcgacgatgggagagccagaaccacgagacaacgatacaatccaccagaaaaatggctgccgaaaagacaagtggccagaaattttatattagacgaaccccaatgaaatcttttagagccccgtttgtaaacaaaagtgtaagtaataaagtgctttctgtctccaaaaaa

SEQ ID NO: 573 - DNA, 804 bp, Plutella xylostella
ggtgccgttcccgcgtctgcacttctacgtgccggggttcgcgccgctgacgtcacgaggcagccagcagtaccgcgcgctgactgtccccgagctgacgctgcaaatgtttgatgcgaaattgactctacagatgtttgacgcaaagaacatgatggtggcgtgcgacccgcggcacggccgctacctcacggtggccacgatcttccgcggccgcatgagcatgaaggaggtggacgagcagctgctgaatgtgcagaacaagaacagcacgtacttcgtggagtggatccccaacaacgtgaaggtggcagtgtgcgacatcccgccgcgggggctgaagttatcttcaaccttcatgggcaacaccacagccatccaggtgatcttcaagcgtgtagcggagcagttcactgctatgttcaggcggaaagcgttcctccactggtacactggtgaaggcatggacgagctggagttcacggaggctgagttcacggaggcggagagggagtctgagtccaacatgcatcaacatgcacgacctggtggcggagtaccagcagtaccaggacgcagcggccgacgacgagggagagtttgaacgcggccgacgacgagggcgagttcgaggaggagggcgaggagttggagtagcaattacttctctttggtagtttagttgtgattgtccatgtgtttgtcctgaataaaactatttctaccataaaaaaaaaaaaaaaaaaaaaaggtgggaagggggggggggggggggcgggccgcggggggggggggggggggcgg

SEQ ID NO: 574 - DNA, 1308 bp, Plutella xylostella
ccccccccccccccccccccccaacacgacgctcttccgatctattctgcatatcacattcagtctattaaatatcaaacacgacgctcttccgatcagttcacaattgagactccaaagagtaacatcaaaatgttctccaaaattttgatcttagcgctggcggtgacagcttcagtagctgaggagcatggccacagccagggtcatggctacagcgtggaggcgctggtgaaccacgaggctccctcgcaggagtacacctacgcgtcggcgccgcagtaccaccagcagtccggacaggaggccagccacgagcagtaccagcactaccagtctcacgaggagaaggagccggcgccggtttaccaatacgtgccagcctatgaagagccgcaacagcattatcaagttcaggagcagccgcaacaacacgcggccatccagagcgctcacgagaatggtcattacgctgctcagcaactcgagccagctcaccaggagtatgcccatcccgctccctcccacgccggcgctcacgctccgtctcacgccaactctcacgccaccaccagccagcacttcaacctgcaccaggtccccgcccaccagcagcaggccgagcacggccaccacgacgacgaacaccacgtcgactattacgcataccctaagtaccagtacgagtacaaagtggaagatccccacaccggagacaacaagttccagcaggagagccgcgacggagacgtggtgaagggggtctactccctgcacgaggctgacggctccatcaggactgtggagtacacttcagacaaacacaatgggtaagccactttcacaattttgaagattccacaaaacacatgacttgcaaaattaagtttgttcaacaatcaaccgacggcatcagcgataaagcgaattaacaagataatttgtgctatttcacatagtgcactctcattgtctagtcactgtaattgaatttattgtgtaaaaagttaaactacatattaatcttcatactatctttgtttcagtttcaatgctgtagtgaagcattcgggccccagccactccgttcacatcgaaagccatcataataactagaaaatatcagtagatgttaatagttaatagactgaatgtgatatgtagaatagaaaacgttgttactatatttataataaacgcagtattacattagcttgctactgtataatttgttgtgttatttaccgatacctcagctacataatattaaatattttaatagtagtttaaagaaaatgaaagacaaag

SEQ ID NO: 575 - DNA, 526 bp, Plutella xylostella
aattcttggaaaaggatatcactgtcaatattcacaggatggaagtattcagaatggaattctcttacgacaaacacggaagaatatcacaaacaagaacccataccagaaatgttggtgtaaacacatacactaatgtgaagaactatacatgggattgcgatggtcagttgactggagtagaagctcaagagccttggggctttagatatgacgacaacggcaacatgttgtcattgacatacagaggtaacaccataccaatggaatacaatgacatggaccgtattattaaattcggtgagggccaatacagatacgacagccgcggttgacaacggcaacatgctgtcactgacatacagagggaacaccataccgatggaatacaatgatatggaccgcattattaagttcggagaaggccaataccgatacgatagccggggcctggtatcacaaaatgctagagaggaaagattccaatacaactcaaagggtcttctaattagagcaaccaaacgga

SEQ ID NO: 576 - DNA, 2149 bp, Plutella xylostella
tgattttatagcttcattggccacgaattctaagtagtccgtgctcggggctcgagtgttccagccaggctggctgcgtgctcagtctgacagccgccgcgcgcgccgctgcatgtgccacgcatctcacacatcgctcacacgaacgttgccaaattgtgaccgcgaacagtgcataagtttaatccttcaactatgttcacgttatgaatggatttcatgtcactttgacttgtgaggataaacgtaatcctacagtatgtggtccacgacggggctgggcgctcgcgtgggcgccgcgctggtgctggcctggtcgctgacgctgggcgccggccgccacgagcccaagaactactcgcacgaattcggccaacccacagatatgtccctctggattgacgagcggcaaatacggatgttcagcggtatttcaatggaagtatatgcgatagtgaacggcaacgtttcgccctacgtgctggacccgaatttcaaacggcaacgtttcaccctacgtgctggaccccaatttttctacaaaacttcccatcataccgtcagaggttggatacgttaactttacgtggatgtcgtgctgtaaaaagtattattatcattttgacacactgacgtcatcagatcctaagatattgaaggcaccatacctgtccataaagaaaaagggaagagtgcctaaaaaagccaaagaatttagccttttcttgccatgtgtggaaaacaacagtggagtggtaactttagaaataggattagttttaaaaaccggcagaggcataccactgaaaggtactcctttaagactaagtctaaagaaggaatgcgcacagagaggtgtgtatttagcaagaacaggtcccgacgcggaatgcgacaaaaagtgcgcgaaccagggctggtgcaataacgacaagatctgccagtgccccgagggctacatggggcagtactgccggacggcactgtgctacccgcagtgtatgaacggcggcaactgcaccgcgcccggcgtgtgcagctgtccgactgggtatcaggggcgacaccgcgctgtgctacccgcagtgcatgaatggaggcaactgcaccgctcccggggtgtgcagttgtcctactgggtatcaggggcggggcgctgtgctatccgcaatgcatgaacgggggcaattgtaccgcgcccggggtttgcagctgtccaaatgggtatcagggacgacattgccattgtgaaggaggcatatgttcacagaagtgtttaaatggaggcaaatgcatacaaaaggacacatgtgactgtcctaaaggctactacggattaagatgtgaattttcaaaatgtgtaatcccatgtctgaatggtggtaaaaattaaatggcatcatgccattgcttttccacgggtgccttgccttagaaataggaatgtgattttagtcgtcgcgtcttcaacaaatttcaaaagtgtagtaggtatctatttgttttgtatgtaggtgatgataatcgtcgtaagaattgcttaaagcaactagggccttagtcccttttctaaatagtttcgattaaaaaagaaccctgaagagcaaaatatacaaacaactcaagatgtaaaggagtgaacaagtgccgctgccctgttgcgctgtaagggagtgaacaagtgccgctgcccagtaggactgcaaggcaaccactgtgaggtgggccgcagactcggcggttcagactgctctagaggctgcagacacctcggactgctcgaggggctgcagacatggcacttgtgtcaatggaacatgtgtgtgcgagcccggatgtgtcaacggaacatgtgtgtgtgagcctgggtggcgaggcagactgtgccaccggagttatggatcttcagaagaatctggtgaatacaagaggccccgatgaagacaaccaattacaatgacaaataattacttaatgatgtgatttttacttattttattatttttatacatattagttttatagagattagtcatttagtattaacattttatgttatgtattttattattattatgatattggctaagagaaaatatgttccgagtttaataagactatcaataaaatataaaattaaccaaaaaaa

SEQ ID NO: 577 - DNA, 1891 bp, Plutella xylostella
atgtgaacctgaacaggcttatatcacaggtggtatcctccatcacggcgtccctgcggttcgacggcgccctgaatgtggacctgacggagttccagacgaacctggtgccctacccgcgcatacacttcccgctcgccgcctacgcgcccgtcgtgtctcctcgccgcctacgcgcccgtcgtctcggctgataaggcataccacgaaggcatgtcagtatcagagatcacggcggaactgttcgagcctcagaaccagatggtgaagtgcgacccgcgagacgggccgagacggatggcaagtacatggcatgctgtctgctgaagtacatggcatgctgcctgctctaccgcggagatgtggtgcctaaggatgtgaacgcggctattgcgtcgatgaagggacgcgccggcatccgatttgtggactggtgtcctacgggcttcaaggtgggcataaactaccagccgccctcagtggtggtgggcggggacctggcacaggtgaagcgcgcagcctccatgctgtccaacaccaccgccatcgccgaggcgtggggcaagctcgaccacaagttcgacctcatgtactctaaacgagcgtttgtgcactggtatgtcggcgagggtatggaggaaggtgagttctcgcgggcgtttgttgaggcacggggaagcacgggaatcattggtatgtcggcgagggtatggaagagggtgagttctcggaagcgcgagaggacctcgcagcgcttgcattggtatgtcggcgaaggtatggaggaaggtgagttctccgaggcacgagaggacctcgcagcgctggagagggattacgacgaggtggccatagagacggcagatctacaagcaagcgaatcacaacattgaggtggctatagagacggcagatttacaagcaagcgaatcacaacacgatacctacccgagaaactaaatactttaacatcagctatcccgccacgaagttccatcctccgacaatagatggcgctaagtagcgaaacattgaaatgcttacgcgaaaccttgaaatgctgatgcaccactagcgaaaaattgaaatgctgatgcaccagagatacggagcttgggaaccagagtagctgatacggcggacaacacaaagacacggctgcaagttttttttaaatattgaatatggcagataagctaaaatgctgttaaaggatagaaaagtccgagttaagctaccttggaaacttggatcttcacaactgcgttattgacaaaacctgatgaagaaattaagttcaactataggtctgaattttattctttgctcaatttaaggaacattcaatcttgcaaatagctgcgatgcgctctctcatttttcactttcttaatggattttttcatgtaattttttaatatatttacttagcaaacactcggtaaaatattttataggttattcacaaaacatcgtgaagaaattaaccttaggctaaaattcaactctaactttttataattggaagatttaaatcttacaaatagcgatgtgcgctctctcatttttcacttttcttcatcgattttttcgtgcaattttatatttacaaacttagcaaacactcggtgaaatattttatatcttatatttttacttttactttggataaatttagaggcgaggtagtgatgttaatatgtatgtgtaagagtaattgtcacgttatatttgtctcagttcgtcctgtgtgaaattatgcaaaagtttaccgtgatcgttattgtctacttagttcgtcccgtgtgaaattatgaaaagtttaccgtgatcgtgaattgcctgtaacgtcttgtttttaataaattgtctagaattaaaaaaaaaaaca

SEQ ID NO: 578 - DNA, 525 bp, Plutella xylostella
ttttttttttttttttctctatggtttctgtccacctttatgacctttccttatttccaagtatagataagttttgatttcagatgaattttgctcctgaacttcgtactcatgctcaaaaagtttgtagtctttataaaagagcgttacgaaacttagaatcctactatgtagcaagatttgttgttcgctatcatcaagtgcttttgagaaacgaattcgacatgaatcaatgcattacggatccaaaagagcagcgccgtttgctatggctgggagagcacgagttgttcttgaaaaagaaccctttccagtgtgcaaagtttgctaaatcttatggcattgccggtggggtagctgttgaacgtgaggtagatccacctgactgggtgttggactactggcatcccttggaaaaggcccgctatcctagctattttgcttgcagagaacatcgcaagaatgattacataaagcactggaatgatgatagtcttctttgaacttaattcgaatacaaagtaa

SEQ ID NO: 579 - DNA, 618 bp, Plutella xylostella
gtttaggtaggcgcatttttttcgtggatatgccatgtcctctctttattcctttgtcaatgctagacactcgaaaagatgtgtgaagttgtgcttttttcacgaggaaagacagctgatacaaacaaaaactacccttattcgaatgtaataagggtcctgtcagatgtctttccccgtgaaacaagtttaagtatagataagtgggtgtagagtccgcgccaccactgattttttgcggcaaaatcgagaactaacttgcctatcatactatctgacatttcgtactaaaactatacactcgaaaagacatactatctgacatttcgtacaaaaactagaaactcgaaaagatgtgtgacgttgtcaatgcatctgtcatataccatgtcaaacatgcttttattgcaggctcaaatattgccaccaagcttatattgcaggctcaaatattgccaatgccaccatttattttatgatttcaaaaggaaggataggcccttcagaatattttactcaaaccttcttcatacaagcaaatttatttagatttttttgcattgaagtcaaacgttatcgagtctattttaacgtttctaccttatacctactggttta

SEQ ID NO: 580 - DNA, 848 bp, Plutella xylostella
ttaaaataatatcattttgtgtctcctttattacgtcctttcttgatatgggcctaagtgtatcctcatcaatataattaatatacaatgacttatcaaacatttcccgttctaccatatcattttttatagacatgtttatagcccgtgataagaaatctgccgtgttattatcgctctttacatactcgatattaaagttatacgcagaaaggaaaagcgcatatcgctgcagtctatttgccgccatttctggcacaccacgcttgctaccaaatattgaaattagaggcttgtggtcggtcctcaacgtaaaaggctcgggcgtcgtcctacacctcgctcgaagaccacgcgatcatatcgtgggtgtctctggggcagcgagcgcggggcgtcaacggtacgtccgtatagatagtggtggaacttcttcacaccaaacactatagacgtcgcttccttctgtatctgcgcgtaattgatttcactcttagctaaggagcggctggcgtaggccacggcccgctccgagccgtcaggctgccgctgagccaggatagcacctaatccggccggacttgcgtctaccgtcacgatcgtggggtactccgggttgtaatgcgccaacacgcgatccccagctaattcctctttaattttattaaacgcctgtacctgttcttgcccccatatccatggttgacccgtttttaacaacatgtgcagtggctttaatatgctagatgtgttaggtacgaaacatctgtaataattaaccatgcccaaaaatgattttagctcagagatcggaagagcacacgtctgaactccagtcacagcgatag

SEQ ID NO: 581 - DNA, 5445 bp, Plutella xylostella
tttttaatgatacggcgaccaccgagatctacacatagaggcacactctttccctacacgacgctcttccgatctccccccccccccccctccccctccacgacgctcttccgatctcaatggtcacgtcactgtgtcaaaaatttatcaaaacaaaatcacgaaattcaacacttttaatatgaattctaaataaattcatagcacatttggctaaaacaatgatgagcatatcaaaagggtgtaaaatttataagaaactaaatagatgctgaaaaatataaaaaaatacaccaatagcagatataacaatgaatgctatgacggtgtttggcgagtattacctgtgatgacgctggaagaggagttttaatgtatagtgacagtaatgtatgggaagaagtatttcatgagatagcaacagagaacacaaaaataggacatgaagtatgcggtatggctaatccaggggaactaagtgacaccaaaatttggtaacgtaaaataatcatagctaaaatgcacgaaaataagtggacttcgggcgctaaggtatcctttaccaggggcaacttctcctcagcattgtgttcattatagtccaccaaattcattccaagggcttccttcttgttaagtcgaagttctttgagcatctggttgcgttgttccatcatcaaagtccgttcgtaggtgtacgccgaaatgtcgctgtccgtcatctccacaacctcaacctcggcctcaatccgcagctggtagaggaacatcttgaggtccttcttcatctgaatggagttgtcctccatctgcgccacggtgaagatgcgcatcttgcagttcttccacgagcggtgctgcttcagcaggaagggaagcagcatgagcatgccgccgtcgtgcacgatccaccagatgtcgatgttgccggataccttctcactagagtcagggaagaagttgatgcccttggggacgagcatggccatgcgggacgcggtgacggcgcgcacggtgtgcaggaacacgtgccaggtgcggtcgtcctccgactgccgccagccgtacggccagcccacgatcaccgtgttcggcttgagcccgccgaggccggtcgtttgcacgaagtggctcagcccatcagcgatgctgtgcgacaccagcacatccacgaagcccttgaccttctcctcctccatgcagcggcgcaggttctgcttcgccgtggacgcctcgcccgccagccgagtgaagtcgccgcccagcaccgacacgcacaccgtcagacctttgcctgctttaagttgactagcaaacgacagcatcttgcggtacttcggcgtgaggtcatcgttcagcttggcgagcaccagcacctgcgggcgccagttcttggtgtgcggcggaccttcttccagacgcagcagcgagtagcgcgcggctgacagggccagaccgcggagaccgtcgccccattccttctccgctccgcgatattcgatgtacttgtagatgagcccggccatgcccatggcgatgagggcgtagaaccacgacgtcatgaacatgatggagatgcacaggaccagaccaatcagggacagggaccaatggtaatacttgaagcggggccgccagttgggcgtcttcaacaaggtctgcagcgcgcaagccaggttcacgaagccgtagcacatgaggaagaacatggatagcagcggcgccaggatgtccacgttgcccagcaggatgccgcactggcagatcagcatcgtcagcaggagcgccctagtaggttctcccctgctagaagacacagcgaaaggtgcaaggaacggaatgatctcgtctttggcgatggcttgcagcagccggggggcgccggtcaaggactgcaggccagcgcccagggtcgacaggaacgaccccaccaggatcacccactggttcggccacgccatgttggccaccaccagtttaccgccaatcgattgaccaagattttaaataagataacggccttaaaccaatattttaaataagataacggcgttaaaccataaatttaaacaaattaacataatgtaaagaattcatagaatttctatctatttcaacccacccgtaaccagcttcctatccgttatctacttaattaatttatctatttgttatcatcaaacgttcacaatggaggaaatattcaaaggatacgcaaaatttggaaacccaaagagtgacggcacacaaataacactaacaaacagcgataaatggatgaaacaagccggagtaatagataacaagaaaatcacaactacagatactggtatttgcttttctaaattcaagtctaaaactttaggatataccgagtatatgcagtatatcgaggcactggcaaaagagaagaaggtggacgtagaagagataacagctaaaatggccaaatgcgctataccaggcacaggtaatgcaactaaagctgataaaagtggagtggtcgaccgtatgacggataccaccaaatatacgggtacgcataaagagagatttgacagatacaaccaaatatacgggaactcataaagagagatttgataaagacggtaaagggagaggtatagaaggtagatcggaccaaaaagaggacacagggtacgtgcaagggtttaaagataagaaatgatgtggagagaataacgtctggagagattaacgtacttgtctcgaagcagcaagttgtcgacggttccggcaaatagcaggacacagacttgtctctaagcagcaggttgtcgacggttccggcgaacagcaacacgcacgacaggtacacggtggaagtggtcaggatagcgcagatggttccgatggggatgctcttttgagcgtcagccaaatctcccgagcggtttgagccagccataataccagtaacagacgggaagaatattccaatcagcagcgtaaacgaagtagtgatgtcggcgtagatctgattgtaagtgggtcgctccatctgctcgatgtcgtcaggttccttcccgtacgcgatgtactgaccgagttccaggaacgagtcttgcagattgtcgaagaacactccactggctaagcccttgatgccttgaacgacgctgatgttgtgtgccgtgaagtacgggtcgcaggtgttgttggggcagaacaacttgaacagctccccgccagcctgcttcgtgcagttgctgatgtggatgtctttcagcaaacgctttcccaacacacacatctgcagcttgtcgttgccgttccagttgacgaagatccccgcgtagaccgcgctgatggacaggatgacgcaagcgagcgccaccgtagcgaacttgttcacgaacttcactccgatgaacaccacacagcccatcaccagcagcagacccgtcccgtacaccctgaagttgttgaacatcgcctccggatccttcgtaaagtccccgaagatcgatatccacggggccatgtacgtcaggacgatctcgacggcgccgacgatgtacatggcggcggcaagcgtggtgcccgtgtagaacagcatgccgaccgcgccgccgcactccggcccgagcgagcgcccgatcatgaagtaggacccgcccgccggcaccacgccgttggtcgcgatggccgacatggagatggctgtcagcatcgtggtacaacaacagatcagcacaatcagaaacccagctatagcgccagccgtgccgacgacccacgtgagacggatgaacaggatcacgccgaagatgttctggatgcagggcaggaacactccgatgagggtgcccatgcgggccgagggcgcggccttgggcgcgtctgtgtccgcggcggacgcggccgggatcgtgttggagtagtccgccagcgagcccaggaacgtggccacgcgcggacggtcctcgatctcctcatggtagaggtagaggttggtgtcgcagcccttgtccttgtccttcggtaggccatgctcgtcggtgtcgcctttcttcgccggcgaggcgcagttgctcttgttcgacggagacttggtctcggccgccatcttctccttctcagaactcatcgcgattcacacagtacggactgcaacaaccgactacaggcagcggcctccgggcatcagggagctggtgggtcggagccgcggcgggctggtcgggcacctggcgggcacctggggcacgtggggcgcggcgcggggtgcggggcgcgcgtggacgagagcgcgcgagagcccggacgctgcccgggcgggtcgatgtggagcagtaccgtcagcaaccgaccagcccgagatcggaagagcacacgtctgaactccagtcacagcgatagatctcgtatgccgtcttctgcttgaaaaaacatgaccacggccctccgagtgtctcactcgtatctcaagtatttacctttttactcactaaccgaccacggccctcccagtgtctcactcgtatctttactatttacctttttactcactaaccaattcctaaatattagtcagtcagtcagttcctataaactaaatcctttgcctacagagttgcggtcgcttttatgtaattcgtgtgtgctatgtattaattgttcgatcacgcggtatttgctcgcctctgtttgtcgtgttgacacggcatggacaaacacacggagcagtcaatagtaattgctaaaacaggttaattaattagtgctgagatgtgtaggttctgtttaattagcaagtgcaaggctttgctaaagtagtttagcttttaaatgacttggtataacacatatgtatgaatttatttcacttaacatcgtcagatgaatatatgataatatttaattatttatatcggataaaatgtagttgtaaacgatataattatatcaaattgaaaatatcaataatcattgcccagcgagtcgcataatttcgcattgcttcttcatagaatactacagagatacactgttaaacaggagctaatgttaatttttcaggtagctaacgctatttcattattgtcatataacttaacgtaaagcaaaacttgcggcctaaagagagcctattataggcagcctacacctttcctaaatgtttcgtggtctatattgataaatcgtgtacttgtctcaccgtttatcatgtaacaaactactctcatctatcaatacttagacgtgagttgggttcggtaattgggttattggacgagacgtccaactcattattacttgtatttagaaggcctgagtagaaaagttggattaatattgtcaatatttcatacaattatgaagtacttatagttaattatatacttattatattacatgatatatttataaaggaatgaactacctctgcgagcttcaaataaatacacaataatatctatt

SEQ ID NO: 582 - DNA, 516 bp, Plutella xylostella
ggtgatagagatagagaggatgacgccagtggtccagatgcaaatgctttcaatgagagcagggagatcagagaaactgttaatgatgcagccggttgtgagaataaatgtgatgatagcgatgataaggttgaagatctgtatgacccggtagaaggggctgtcccagttgtttttggcgaagatggaaatgccaacgaacgacaacactcggttgaggctttgtaatgtctcatccatgctgcgtagtagaacgaaatgaatggagaaccagattggaagtaagacctctagttgtaactggtactggtgggttgaaaggtggctaattttgtatcatcacttagacaaaaagaaacagaattttaatttatgtacctaggtaaatacgcttaagggtaagcgtccacttgccccttgatttatgatatcatcatcctcatcatcatcagccaataatcattcactgttaaaaaatagtttcctattaattgtatcaccacttagacaaaaaaa

SEQ ID NO: 583 - DNA, 1400 bp, Plutella xylostella
gtttggcaacaataccaactatgcttacctataagactatgcctaagtattatttggcattcaaactgtcgcccttccatctgcgcccgcgcaggcaatccaataaatagacaagagcgccgcgaggccgctacgtaccacccgcaacctcgaccagtccacacggaccggcaccactaagaaattaccagcccctaacctcaacgatgctgctagcgtgggtggcgatggcggcggtggcggcggcgggcgtgcagggctactccagcggagccccggacagcgcctgccaggacatggtcccgcggcaccccgtgtctgcgcagaagtccgcggccccctacagcatcaccaccagctctaaggtcgtgaaagcgggccagccactccaggtggtgatctccgggcgaggcgcctccaacaccatccgggggctgctgctgcaggcgcggcagggaggcaagcccgtcggcaagttcactgtagcccccaacgactccttcgccaagactgtcgactgcggcggccctgctaccgcagtgtcccacaagaagcacgacgagaaggacgacccgcagaccgtgacctacacctggacgccgccggccggcttcaacgacgaaatcaaagctacacgggttcgttatgtcgataaactcattttatgcgcgttccacctatcacagcgccgtctttatgcgaatagtgacaaagtgacgttaatcacgtcgataacaatcccgtgtggcgaccaccgagatctacacatagaggcacactctttccctacacgacgctcttccgatcccgtgaagtggcagctgttgtattcttcgtcctagctgcaagatttgtacaatgactacaatagacactattcttgtcttaaacgtgaaatattgttagatcggaagagcacacgtctgaactccagtcacagcgatagatctcgtatgccgtcttctttcaggtacatattcaacatctttccactgtcagttgttaagatgctaccagcttctctttatacttaggtatgtttcttggttaccacctaacaaacaaaagctacgatcgcactgaacggagccgtgttctgggtcggagtggaatctgctccaatcaaggtttctagctaaataagtgtaataatatgcataaagtatttgaaatatgtacataaatcttcacattttcatcagtatttaccaaatgacatgctattctatgtagtgatttaatatatttttataataaacttttcttctaaactaaaaaaaaaaaaaaaaaaaaaaaaaaaattaaaccaaaaaaaaaaaaaaaaccaaacaaacacccccacccccccccccccaaaacaaccaaaaaaaaaaaaacccaccaaaaaacaacacaaccaa

SEQ ID NO: 584 - DNA, 486 bp, Plutella xylostella
tttgaggtacagaacccaaacattctctggaatcacgttaaaaatacaatccaactaacgtaccgggggggacagctgggctgctcccgcgccgtaggaggttggaccccatcaccgttgttgaggccgccccctgctcttccgatcttctgtctggttgtggaagcggtgagacaagccggcagcacggagcagttgatgcgggcagagaagcactggcacagggtgcagttgtcgcgctgccaccgcgcgccctccggccagtagcggcccaggtctacacatcttggagcaggcgccggcgctgagcaggacatgggaggttattggggtgatacgtaaatatgataattgaagagtaaataaatacgataatcagacgctctgtcgcaaactgcgtaggtctccgaggatttggcggtatattggatgctctaaaatcagtttcagccaagagagcgttatcatcttctcccaaagggtcgc

SEQ ID NO: 585 - DNA, 525 bp, Plutella xylostella
aaatacctgcaaatggattggtgttacttagctacgtttaaaaccaggtgtccaatggaattcttctcaaaagtctatatttttttgtttcccacttgtaaatcaaacgaaaatatttcaaaaattattgctaaaatcaggcagccgtgtgaaatacctgcaaatggattcgtgttacttagctacgtttaccaggtgcccaatgaaactcttctcaaaagtctatgtctaaagacgtgtgtacctactcatcacaaattattaacgaaaacattgaagaaacctatggatgcatcaatgaaaattaaggaaaggcagtatctagcacttcatagcatgtaaaggcagtatctagcacctacttcatagcatattaatactgttgcgcttcaaccattcttcttactgaagcacgtattttaaatgtttatgaataaaattataataattttacttactactgcgattttccgccgtttatataagaaaaagaaatgcaaaaattgtccaaaatgctcgcaacca

SEQ ID NO: 586 - DNA, 1761 bp, Plutella xylostella
cagctgtgccgtatactggtgttaaacatttctctaccatgtcagtacttcagagcaatgacccttgcggacctaaaaagaacgatccttgcgggccgaaaaagaacgatccttgtgggccgaaaaaggaaccagcaaaagacccatgtggccctaagaaagacccatgcgcgcctaagcaagacccatgtgcgcctaagaaagaacctgcgaaagatccgtgcggccctaaaaaagacccatgcgcgcctaagaaagacccatgtgggcctaagaaagatgcacctaaagacccatgcgggcctaagaaggaagccccaaaagacccttgcaagaaagtgtgctctgatgttagagatgatgactgctgccccccttgtcccccttgcccaggggagaagggtaaaggggagggccccccgaagagcgccacggcgggcgctacagggcagattattgcagtgattggcgccgtagttgatgtccaattcgacaaggacctcccgccaattttgaatgctttagaagtacctggccgcacgccgcgcctaatcctcgaagtgtcccattttgaatgctttagaggtacctggccgcactccgcgcttaatcctcgaagtagcccagcacctcggcgagagctcgtgccgcaccatcgccatggacggcacggaggggctggtgcgcgggcagcaggtcgtggactcgggcgcgcccatcaccatcccggtggggcagcccacgctgggccggatcatgaacgtgatcggggagcctattgacgagcgcggccccatagagacttcagagttcgcccccatccacgcggacgcgcccccgttcgtggacatgtcggtggaacaggagatcctcgccacggggatcaaggtcgtggacctgctggctccctatgtcaagggcggtaaggtggacctgctggctccgtacgtcaagggcggtaaggattggtttgtttggcggcgcaggcgtaaataggtctgtttggcggcgccggcgtcggtaaaacagtgctcatcatggaactcatcaacaacgtagcgaaggctcacggagggttttcggtgtttgccggggtgggggagcggacacgcgaagggaattgtgtttgccggagtgggggagcggacgcgcgaggggaacaggacgcgcgaagggaacgacctgtacaacgaaatgaaagatctgtacaacgaaatgaaggtggggggcgtcatcacggacgattacaagacttctaaggtggcgctagtatacggccaacgacgattataagacttcaaaggtggcgctagtatacggccagatgaacgagccgccgggcgcgcgggcgcgcgtggcgctgaccgggctgaccgtggccgaacacttccgagacaaggaggggcaggacgtgctgctgtttatagataacatcttccggttcacgcaggcggggtctgaggtgtcagcgctgctaggccgcatcccctcagccgtgggctaccagccgaccctggccaccgacatgggcaccatgcaggaacgcatcaccaccaccaagactggctccatcactagcgtgcaggccgtctacgtgccagcagacgacctaaccgacccggctccggccaccacgttcgcccatctcgacgccaccacggtgctgtcgcgagccatcgccgagctgggcatctacccggccgtggacccgctggactccacctccagggtcatggatcctaatataataggaccagagca

SEQ ID NO: 587 - DNA, 466 bp, Plutella xylostella
cgcgaagattcgaagtatcaaattatcctacgacattgacatagattatatggaccaatttagttcactctcaccggaacagataagtttgtggcactatacgtactttatttggacgaccaataaagttattcattttcctttttcggaagagttactatagcacaggtaacgcagtttgaggtcccagaaattatagtttctgaatgttataataagtagtgatggataataatttttttagtataatcgtaattattatactaactattacatcactagtatcatagagaaaaaaaaaacttaaaactaaaatggcagcaacattttattttgacttaaatatttttgaaaacagctgatggattgtatgttgcgacatttgttaatttacattagaaaacgataggaggcggtcaatgtactggcatgtcagtcacgattcatcatcgaaggttccaggcca

SEQ ID NO: 588 - DNA, 830 bp, Plutella xylostella
gcgccgatcttttagtttcataccattcagttagtttacctgtgactgctactggcctcagtaacataaggtaaatacactgatgaggaatgaagaagttacagttatgaaagcaccaaattgctgctgaatggaaaaggttagcttaatgacaccgcgccgtctgcaataatgaagtatctacatttaacaaagaatatgtaaggtattaaacctgcgccgatcttttattagtttcatactatatttaccagcgctgctggtggacactgtgctggctgctactgggattagtcagattaacagcgttgatagagttttagctgtggagattaaataagcgcttatcagcgcgggttaggaccgtatagtttgtaaaaaacaacaagaaccctttaagtaagcgtcctgacgtgacggtatcgtacgtatcgcaccaaacagattgtcataaataaatgtagaaacggcgtcggcaatggcgactccgaagtatacagatacctttattcgcccatgctttgatctaactaaaacttattagggaaacaaaaggtatacatgttatgtacctactcaactaatcattaaacagaatgtttaatttccagaccaacaagaccgcccatgctatgatctaactaaaacctcattaaacataatgtttaatttccagactgacaagaatctacaaaaaggcgtacaaactgaacacaaccctcagctatttcctgatcaagacctttgactggcacgatgacaacacactggctttattcaacaaactgtccaaaactgaccaagaaatattcacctttgacatagcgcga

SEQ ID NO: 589 - DNA, 469 bp, Plutella xylostella
ggttgtgggttgtgcatcgttacatcgttttacagtttttacacgaacaacttaggtacctactcatgataataatgctatgcattggtataataccttggtagataataattaataatgtaggtacgtatacctacccagtattatagcagtatgtagttagttgtgagttaatgagttgttgtccgtaggtttcatgacttgtgtaagtgtaaggactgtaggtactgtaagtacctatgtgtaagtacttacctacattatacctatcacctctaattgatattttttattgcgtaaatataaaaataagtgtaaaaaagatgcacttaatgctaaaagcattgtctgccggtcaacccacaggtggtattatctaggtacctatacatgtttatgctcgggcaaacaccatccgtatccatgctgagctgaaaacatcatagacaacgcagcaacgtccaacatg

SEQ ID NO: 590 - DNA, 1958 bp, Plutella xylostella
tgattaccaactaccctctcgactcgcaaggtgtccaagtgaactgctaccatgaaataccaaccagtccatcaagttcgagcacctccaccccgtgcccgtgtacgtcaagaaggaacacagccatctcctgcaccacccacgtgcgtaatttattttactcgtgtatcttgtgcttgagtgtgtgtcgtagatcaactcagagatgtgccttaatatgttgcggatagatcgtgtgatccaattgagttttaagagatgtgtcttaatatgtcgcggatagatcgtgtgatacaattgagtttttctttagttttgtgattcggacataaatattttgtttgttttgtgattcggacatttatcattaatatttctattttttccctttagtctaaatcgctttttccttttattctctttggtctaaattaattatttatactgtaacttgattgattattcacataatacagtaccgggtaaaaatagtaaaaaagaaattgataaatataatgtacccggaaaaaacagtaaaagaaaatgatattaactccacccggaaaaatagtaaaagaaattgattttaacttaggcaaatgtgtatgcgtcgacccactgactcgtcacagggaaggcttccctcactccaccgacacacttttgtgttagttacccaattcagtgaagttaacaatataggaagctaataaagttacgtaacggtccgccgatcgctccccgcagctgattattggcctccggtcaaacgggttgtgagataatgccgcctcgtaaccgtctgtaatccctgcactaattggcagccgtgtcccttacacagatcctaggctattatattctgagatagcgcgaagttcctatgaatatgtctcccaaatggaacctttgcatacattgtccttacgcagatctaaccttcgctttttcaaacagattctattgggcttcctgtcggtggtagcagcctaccccggcatcatccacgacgaaggaccacaggtggaggagaagttcgaccacgcagacatcatcggggagtcgggccaccagggacatcatcggcgagtcgggccaccaacaccacatccaacacgagcacgccaagtcacaccagtccatcaagttcgagcacttccaccccgtgcccgtgtacgtgaagaaggaacacagccatctgctgcaccacccgctggagaagggcaagtctgagcaggagctgaagcaggtccacccggagactgagcataaatacggaggcggtctgagactgagcataaatacggaggtggcttggtgttggaggaccacaggttcaacactgaccacttcgccggcatcgagcatggcgccagcgagctcggcggctacggaggcttcgagggactcaaggcctacagcggaggagagtttgaactccaccagccgtccctcgagtccgaaggcggccactaccagttccaagctgaaggcgaaggcgagggctacaaattcgaaggctacaattaaatcgcatttagacgaacgccgctaaagtattcttagtatgatcggactctgctctccgactttttctagcttgtggcaaatgtacctgaaataggattagtaggttaaattgatgaagcaacccgtgaattctcatcgtcgtaatgttaattttgtttctagtgttgttgctaaatcttgatctgtattaggcgttgaaattgggctatgaaatgcatacagtttgtcctagaaagttagtaaattgtaactgctgcgaaccgactgatatgacttggtgtgattgtttgttctattgattgtattaatgtggttaatactctctcttgtatctcattatagtgtaagtgcgacttgtctgtttgttgtaagttccagtgaaattgtgatattaataaagaatgttggtttttaaaaaaaaaaaaaaa

SEQ ID NO: 591 - DNA, 459 bp, Plutella xylostella
gtgtgtaaaaataagtatgtcagctgttcgatatccatattacttacagattctgcctttattttgtgatttgcccatataaggtaaacgcggcgatctccgccacccaaaaatagtgaaggtgtcaccgtcaccttcaagaaatttcaatttactgacagtacgagtcgtggcggtaatgccaaaaatcgacctaccgtccttttttatttatttttgcctataactcataggtttttcatatattttatactagctgtacccgcgagcttcgcttcgccttaaaaagttttcccgcgggaattccgggataaaaagtagcctatgttctttctcagggtcaataagtacctacttaagtacattccatacttacttaagtgcttatatgaagaaaatctaatgtcgttaatataatttatcaaccgaagtccgaaacccttgttttcgatcttcaaa

SEQ ID NO: 592 - DNA, 458 bp, Plutella xylostella
gtcctgctgtcaatctgttcgttgctgacggacccgaaccccgatgatcctctggtgcccgagatcgctcacatgtacaagactgatcgggccaagtatgagtccacggcacgctcctggacacagaagtacgccatgggctagagcctggagggccaggtggtgaccatggatgtgccgaacggccagctggtgaccatggatgcgccgagccccagaaccgttatcacctaaataaccagccaaaagtatcaccccaccccgtgacgaagtgaatggacttttgaggccgtcgtgcccctgttgaactcgtatgaatgtactcttgccatgtcaagtccgttgggtctgggtagtctgttctacctgacgtttcgttatccattaagttaaatctctgtccgtatcatgatatgtatggctttccattgcatgctttgattgggtttgcaggctgg

SEQ ID NO: 593 - DNA, 4017 bp, Plutella xylostella
ccgcgtctgtgatcgtgacggagacggacgtgaacgacaacgcgccgcagttcgccgacgatgacgtcaccgtggtcgtgagcgagaccgcgccgcccgacgtcatcgccaatattaccgctactgaccgggacagcggccggttcggcacatcaggcctggtctaccagctatggggcgcgggctcggagctgttctcggtgtcgccccgcaccggcgccgtgtcggtcgcgccctgcgcccgccccggacacgcgccgtgtctggaccacgaggcgcagaaggactacttcttgcattataaggcgacggacgatgacggcgcggggcagtcaaccgtgatctcgctgcacgtgcgggtcacggacggcaacgacaacccgccagtgttcgcaacgcccgtctacagggcctccatcgatgaggatgccgtcaagttcgaacctgaactacaggtgcaagcccgcgacgtggacgagacatccgagatccgctacagcatcgtgtctccggaagactccccgttctgggtggacctgctgacgggccggctcggggtcaggcccgaccagcgcgtcgccgtcgaaggggaccacaacaagatcgtgctcactgttatggcatcagacggcgtgttcaatgcgacatgcgaggtggagatctcagtgcgcgacgtcaacaaccacgcgcccgccttcgacgcagccaactacactgcgctggtctcacgcgcccgcattcgacgcagccaactacaccgcgctggtgtctgaggacactcccattggaacgtcaatagcgtcagtatcagcccacgacctggactcaggagtcaactcggagctggtgctgggtcagcccacgacctggactccggcgtcaactcggagctggtgctgtcgctgcggcgcggcgcgcaccacgccttctcgctggacgacgacgggacggtccgagtggcggacaggctggactatgatgtgcgggatacttaccatgtgatcattgaggccgctgataagggaatgccaagcttgactggaacaacggagctgacaataaacgtgataaatgtgaccgacgggacggtccgagtggcgaatagactggactacgacgtgcgggacacttaccatgtgatcattgaggctgctgataagggaatgccaagcttaactggaactacggagctgacaataaatgtgataaatgtcaacgataagaaaccttccttcactcctcctatacaaagagctgaggtatccgctgatgcagaagtgggcacattcgttcataacttggtggctgtggatccagacacgaacaacaatttagttgctgtggatccggacacgaccagtattgaagatctgaagtacgaacttgcgaccgacagacaaatcatagctgttgacaataatggaaaagaggtatcagacgagggtatattcgggggctggttctccgtctcacccaacggctcggtgtgggtgtctcgggcgccggaccgcgcgcgcgccgccgtggtcacgctgcctgtagctgtcacggatactgccgcgcccagtgtgcagcgcgctgacggcgagctaataataacgatagtggacgtgaaccgccacgcgccgcagttctcccaagaggtctaccacgagacggtggtggaggagcagccggccggcaccgcgttgaacacctacgccccgcgggacctggacactggcatcgccgcagtactcgccgcgggacctggacaccggcatcgccgctgtggtgatagacccgccgagcccatacttcgtcattgataatgttactggcctggtaaaaaccgcgcaacgaatcgactacgagaaactccagtacataaacttcacccttatcgcatacgacacaggggtaagtaaaaacagcgcaacgtatcgactatgagaaactgcagcacataaacttcacgcttatcgcgtacgacacaggggtgccgcagcggtcgtcgtccgctgaggttctggtgtcagtcgtgaacgccaacgatgaagaccctgtgttcacggccgccagctatgagggcgtggtcagagagaactgccgaggttctggtgtcggtcgtgaatgccaatgatgaagatcctgtatttacggccgccagctatgaaggggtggtgagggaaaatagcgccgtcgggacgcctgtgcttattgtcatggctaaggacgctgatctgggagagtttggcgaagtgtcctaccacctgtcgggcaaccagtcgtctttattcagcatcgatagctccggcgccatcacggtggcggcgcccatcgaccgcgagctcaccagcctgttcagcatcgatagctctggcgctatcacagtggcggcacccatagaccgcgagctcaccagtgacatctacctgcgagtggtggctgaggaccaggcgcccaaggacatcaggaggtcttctactgctcctatccacataaaagtcctggacgagaacgacaacgcgccggcgtttacacagcaggtgtaccgcgccaccatcgcggagaacctgcgcgtgtcgcctcctgccgccatcctgcagctactggctgaagatgcccgccgccatcctgcagctgttagctgaggacaaggatgagggggctgctggcactgtgtcgtacaggatcgaggatcagagcgaaccgggagtattcacagtggacgaatcaacgggcatcctgtaccccgccaagcctgtaacaggcgaccgcagctacgaggtgacagtgtcggcgtcagacggcgcgcactcggtcgccgccgccgtgcacgtgtccgtcacgcgcgtcaataaacacagccccgtgatcctgcagccgccgcccatgctggaggtcaagccggagcaagcgcaaccggactccctcctgaccacggtgcaggccacggacgcggacggcggcgacaacgggcgcgtgtcgtacttcctgcggctggacgaccgcaacgtggcggagacgcccgagttctccctcgaccagctcacgggcgagttgagggctcgtgtcgcgctggatagggaacatgggccttatcagctagtgctagtagcctcggaccacggctcgccggcgcagttcgagactctttgaccacggctctccggcgcagttcgagacgctgcgcgtggtgtccctgacggtggcgggcggcgacgagcacgcgcccgccttcccgcagaccagctacgagctgctggtgccggagaacctgccgccgggggtcattgttggttccctgaaggcgacggacaaggaatcgtgccggagaatctgccgccgggggtcattgtcggttccctgaaggcgacagacaaggaccgccggcacgcacggcactgtatactaccacatatgccggcgcgcacggcaccgtgtactaccacatcctggaggggaaccatgacggttcattcacgctggaccgcacgcaggggctgctgcgcaccaacgccacctttgatagagagcaacaatcagaatacaccctcacggtggaccaacgccacttttgacagagagcaacagtcagaatacaccctcacggtatacgcgagcaacaacccgatcctggagcgagcggcggccatcttgaactccatcgacaagcacgagaacggctcggagctggcgggcgcggccagcgtcgccgccgtacgggttagagtcatggatgagaatgacaatgccccgaggttcctcaacaaggtctactatgctggcgtgaagcacacttaatgcgccgaggttcctcaataaggtttactatgctggcgtgaagcacacagcaaagatcaacgaggccatcacctcagtgatcgccatcgacgaggacttcgcggagaatggcaccctgatgtacctggtggccgcctccaacctgtacaagttcggcgagagcacgccggccggcagcatcgtgccctcgcccttcaacatcacgcaggaaggagtgctgatgacggcgaa

SEQ ID NO: 594 - DNA, 515 bp, Plutella xylostella
cgcttttggtaagtttaatttaatttaacatcactccaatctctacgcttaccgtagctagtgtttaataataactgctgcagaacaatgcgttattttgtctttctcgccttattcggggccgctcttggtaagtttaatttaatttcacatcactccactctccactcttaccgattcattggcagatatcacctcccattgcaacataatcttacagattactgctatcgataaccgtagttcgttgttgattgttttaatcgactttaaaaatgagactttgacctgcatgttgatcactgatctcacgtttggctgaatctactttgacgacgttttcttttaacacaattgtaatgactatcaacagcggtccccaagttcatttagctgaatctattttgatgacgttttatttaaacacaattgtaatgattatcaacagcggtccccaagcctcaccagcgcatcgccggtggagagacggcttccatccaggactacaagttctt

SEQ ID NO: 595 - DNA, 446 bp, Plutella xylostella
acgaggtgaccgcctgtaaacgagagaaaatacgcttcctggaaacactaacgaaaataacggtaaatattcttgttgtagattcgctttattttagaagtagcaactgtaatggcaatgatttatatttctttctttgcagtccctaattccagatagcattataaactcaacttttcaaggtaaagattggaatctttattggatcaggaaagtatggaatacctactatagctgcattgtttgtttcagaaaactgaggacaaagtggggatacagcaaaaattggctgcagaactggtgacgaaggaggaaataatagacaatatgcaaaggcagatccgagagctatcaaagaacgtgaaactaaatttattatttcagcgaacataaagtgatgcagtacgaacaatacgtgagagatttacaagcaaacaacaccaata

SEQ ID NO: 596 - DNA, 537 bp, Plutella xylostella
tgtgacatcgcctccgtggagagcagcagcattgaactgggagccgttgatgtcaaccttccttcattccaaatgaaggctgagcttctgtctaccaaattcgaccagttggacggcgatattgttgctttttccgtgaacaagcaggagaatctggccgtgctggccgtccagttctccaatgtcaccaccgacaccgtcggagtgttcgagttctaccccactggcaaggaaccctgagtattcaccctcaccggcgatgagatctaccctaccctcaccattaccacctacttccagttggactctactgttgacagctcagaggactcttctgaagaatcttcaacctcagctcctactgaggaagaatcttcgtcctctacttccgaagaatcttcttctactgaagaagagtctaaccgtgaacatgcaggagaatctggccgtgctgggcgtccagttctccaacgtcaccaccgacatcgtcggagtgttcgagtactacgcgtccggcaaggaacccagagtattcac

SEQ ID NO: 597 - DNA, 432 bp, Plutella xylostella
gagttcggttttacgattttgtgactttattcattggtacaatggttgatattaggttgaacttaaaacggtttgacagtactcgtaaacaaaatgcagacagatttttgctttgtttttgtgtgtgacacttcatcttaatcgtacattgtgaatctaagattaccgcagtagcgttccgaaacttcgtttttcgtaagctagagtgctcccttgataccgtttctttcgatttcggtttccgttgtaaaaagtagttttggtcggacggatttgtagcacatttaacggctagactgcacagttttggtcgcacggacttgtaccacatttaacggctagactgctgtcgtcgaaatataataggcccgtttggacagctccaaaatgtatgggatgacagctggtgtcaaacctatatcatgaaaattt

SEQ ID NO: 598 - DNA, 1548 bp, Plutella xylostella
ccagccccacccgccccacgttgcacaatgctgctgccgacgctgctcctgtgcatgttgcacttcctggcagctgaaataccatccttcattaaagtgtgcaaccgcccccccccccccccccccccccttcccctacacgacgctcttccgatctgaatgatcctcacctgaacaaatgtatcatcaactcagtggaggagctccggcccaagatcagtaagggtatcccagagctggacgtgccgggcatcgagccgctgtccctggggcagatcgctctggcccgcgggccccagggcgccaagctcaccgccgtcgtcaacgacgtcaaggtcaggggacccagcaacttcgtcattgaggaactcaggtccgacctgacgaagaaccggttcgacttcaagctgctgctcccgaagctggagttcagcggcaagtacaagatggacatccaggtgttgctgctgcggctgcagggccgcgggaacatcaccggccagttcaaggactacgcctgcaacgtgacgatgcggggtcaccgggagacgcgcggggacgaggagtacttgaccttcgaccccttcaaggtcaagttgagggtcggccagtccaacatctacctgactaacctgttcgacggcgacccagtgctggggcccgccaccaaccgcgtgatcagtgagaactctaatgtattcctggaggagatccggccggtgctggagcgcagcctcggggagatcttcacggagatggccaacaagatcacgtccaagttcacgtacaaggagctgttcccggagggctgatgcagcggtcccgcagctgccgggacagacggtccaacgcgatccaaccgcagcatgcaacgatattttaaccctttagggccgatttttcaatggtcagataaacgttatctgaggaataattctgatgctgtcacatcagaatatttgtattagacagtgacagcaacaattaacgaaaaatcagcccttaatataaggcaataaattcaaatgtttaattgtattgccaccatatacaaggagctgttccccgagggctgatgcagcagtccagtagcagccgggccagacgatccgacgcgatccaaccacgccatgcaacgatattgtaacaccaactagatgacgattcaatgatattgtaacacgaactagattgagcgtctaacattaacatatattttttcaacttaaagtacggttgcatcttaatgatgggagtcctcagttaagtaaacctcttctatagcttgattaataagatttattattacaagctacattggaaacaagatgaagtgtcagcgcaaaagaaacgtctcgacaattaacacctaacttctgcttcttttgaattagttctgttagaagatttttgtcttcatttattggtacaatggtagtcaacttcatcaatggtagtcaagtcatcaggttgaacttaaaacggtttgacagtcattaacaaatgcggaccatcttgctcgtatattgttggatcgcgaggatcgtc

SEQ ID NO: 599 - DNA, 417 bp, Plutella xylostella
gtgtggccagttctttttgtgatttttgcagcaacgctctgtgtcagtgtgagtccgctcgcgccaagttcagcttcaccaacttcgacaacgacatcgcgttgctgcggctcaatgaccgcgtgcccatgtccgaggccatcaagccgatttgtctgccgcctgatgataagagtctctacgtcggagtcaaagccgtcgcctcaggctggggcacgctctccgaggagggcaaggtctcctgcacgctacaagagggtgagttacgttttgtgatggcatgtaggtgttttcgtcatggtgaaggactaggtggtcagcatactgactgaaagcactgcaagacgtgtcaggaactatacctgactctgggacacagttttcgtgcccataaaaatacaatgaactatattcacc

SEQ ID NO: 600 - DNA, 445 bp, Plutella xylostella
tatcctccgatctgccgtgtaccgccacgtggagcgccgcttcaccctgcaagtcacggaccgtagcggtttactggtttctgattgaaacatatacgtatggtgcgtttaacctgttgtgtgttggggtgtgctacaaactccttctgcttaatgtcgacggcgtgttgcactcgcggcaacacgaagtgccggcgtccactggagcccgcccggtgtttcaacactgtctccacttcttcggatgtgcggcagcaacctacgaataaggggaaatactgcaacccgtagctctggcctcgctgtctggccagtctggtgaagtatagatgaagagcgtggtggtgcttcgaggtagaagcattagaagatttttggctgatgctggtgtacgcagtgcagttggcgaagcagatagcactctagcagttcacagagaaggaga

SEQ ID NO: 601 - DNA, 699 bp, Plutella xylostella
cgggctcgtgatgagagtagactgtgcagagactgagcgtgtctgtgactgtgccgagactgagcacgggaaagttgtgtcttgtgacgtcaccggttgtgacgtcacagtgagtgcagccacacagcagtgcaccgtgagtgagggcagccacacagcagtgcaacaacatgtgggctcacatatccatcgccttgcgagtgagtgcagccactcagcagtgcaacaacatgtggactcactacccacacaacagtggaacagtgagtactaatattttgcaaaaaaatacgtataagtagttaggtatagtttgataaacgattgcgagagttttgtttttttagcaatgcacaatataataaatatagtggtgctggaaaccacactcttaaaactactctcgaccttcctcatccagccactaccaagtatttattttagagcgtacatccatcgccttactggctctcttcagcggcgtacagctagcatcgtccggcaactggacggacacacatgcggactcacatatccattgccttactagcgctgttcagcggcgtccagctagcatcatccggcaactggacggacatgtgtgagctggagccgtgggacgccggtccctggagctctcccctggggctccgcggctgctggaggagtgggcgacggcgggggcgggcgcgggagcgg

SEQ ID NO: 602 - DNA, 551 bp, Plutella xylostella
acctcgtttggagtcggctgcggaagacccgatacgccagccgtttacaccgccgtgtcattcttcacaaggtggattgaagaaaatgtttggcccgatgaatatatttaagccactagctgtttctacgagttttgcttcgcccaataatgttttctagttataatgccgggataacaagtagccatataggttaatctagtgtgtcacctttttagatacaaaaaatctaatttacttactcgtttttgcgtgacagtagagtagcaattctatccatcaaataaactgtagtccatatcattagtaaaaagtattttatggtaattttaattaaaaaaatatattgctgaactatattgtaactgtaatacgttataaaagccaccgtagaagtagattttatgaaaagagaccgttacaattacaatacattacttaaaatataacaaaaagacggccgaatgacgtagtggttagtgaccctgactactgagccgaaggtcccgggttcgattcccggctggggcagatatttgtttaaacacaga

SEQ ID NO: 603 - DNA, 411 bp, Plutella xylostella
atgttgcttcaccaatcatattcattggtctcaatggaatagcactggtgggaatggatttatttagtagcatagctgcaaagcatttgtctggtgaaaggcaccctaaaggtccgtcctaataatagtgtgacattcgtcgtttcggaaatacttccgcgtacgacattttgtgctatttattctcccttatacctacataattatttagacaatagaaagtcaactttttgtgctctaagatcatataagtgaatttatgactactgccgtgattgctttctgttgactatttcatgtcataattattgactaatgtttttatccgtgtcgttacagatacgtgctgaagtcgcacgccaccagcatagagacgatcctgcaccttacgccggaacaagagaaggacaa

SEQ ID NO: 604 - DNA, 414 bp, Plutella xylostella
agctggttgtacaggttgtacttctgctaagtgatttaaatgcccaatgaaaagttctacccataaaactattctattctttctttgttctattaaacagctagcttttccgttttggagtaatatggtgctatctggaactttttattatttttgacgtactttacagtacaataagtagtatatgctaaaactattagttaggtaccgaatccatcaagaataaattcatcttcctcttcttccatatacctacttacgtctctgcaaatcattgagtatgacacccgagtctgcattgttctatgctgcaaaagtattaataataaaacctgttttgattgacttttgacttcagattcgtgctgaagacaccctgggggagccataccacatcaccaccacccagctggt

SEQ ID NO: 605 - DNA, 1168 bp, Plutella xylostella
actaacttagccttaggtatgtcgatattacgatagggctgttgcaaaccctgagaaattgatcaatgagtttttgctctaataattcccacaattatatatgcttctataaaagctaatgatgtggagaacatagtatgcactattgtctcagtttccaatagagtctttccttccatacgtgcagcccaatcgtcagccataatgttgtcaaagttttcatattgaaattgtgtttcaattattataattatctattagatttattagtacctacattagaagataacattctatttatctgtgttctcaagcataaattgcgcatggcttcataattttaatttaagcgaatcctagacaaaataacatccggcgatctcccaccagcacattcacaagcacgacggtcaccaccaccccgtggcgatacaccacccggtgccccatcacctgccgatccttcatcaccacatcccgcatcacgagccgattcatcaccacgagccgatccaccaccacaacaaaacatccaatctactgtatttacttaccacttttgatacaccttgtatgttttatcctaggtcgaccaaccagtgcagcagctagtgttgattgtaggtacttacatgggaaacccaccgctccagggtccgcagagcattggcagtcttctttttcgcggcttcggtccaggccatcttcccgctgttccatcatcaccaccaccaccacccggcgatctcccaccaacacatccacaagcacgacggccattcacaagcacccacaagcatcgacggccaccaccaccccgtgccgatacatcacccggtgccccatcacctgcccatccttcatcaccacatcccagacggtcaccaccaccccgtggcgatacaccacccggtgccgcatcacctgcccatccttcaccaccacatcccgcaccacgagccgattcatcaccacgagccgatccatcaccacattcctcatcatgagcctatccatcatgatcattacgcattccccgagtacaagttcgactactccgtccacgaccaccacacgggcgacgtgaagagccagcacgagagccggcacggggacgtggtgaagggcggctacgagctggtggagcccgacggcagggtgcacaagg

SEQ ID NO: 606 - DNA, 411 bp, Plutella xylostella
agggtttatgttatattaaaaagtgttaagttgtcaaagataaattaaaagtttctgaaaaaagtgtttgtgttacatttggtcgttttgaaagaagtgcgtgataatatatgtacattgtagcataacatgctctaacattatagattttagtacacaatatatattcttggaattcgtaaatataggtaacaaaggggcagtatgtagctacagtaagaagtttattattataaaaatcattttctttgctcattgttccttagttgggtacctatattaatttattttaatgatcaaattactatatagggctgccactagcatttgtgatgtaaactaaactattgtgtgaaccaaataaaaagatgtcggatacgtctaccgacatcagagaattgtacgagtagg

SEQ ID NO: 607 - DNA, 1310 bp, Plutella xylostella
gtggtatttcttcgctgttcttttactatcagcactaaaccggaatgctcctctatttctttttccttctctaccagtggttctgatttctactgccttttcaacttcatcttttgttgtgaatttgaattcatcaacatctacattcatcgcatcatatcccttgtcagtgtttgtgccacctgctaggtttaaatcaattacttctgcattatcatttgtaggagatatttgaatgttttctgcaatggtgcttagatggttaaccatttcattgagtttattatcagacatttgcgtttccacattatgttcagtttgtttattgttatttaacgtttcttgttgtttcatcaacatcttttctatttcttcgtaaataattgtttccatttcatctttattcgtatccatatccattagtttattcacattcggcgtctcctccataactaagttttgttttttattgttatgttgttttcgagtattggtttgtttgtttgatttattgttggtgctactcgtagtattgctgttgtcttctgttttagtatcattcattttaccaatatcatcgtttctatcatagtagctaggtgagtcttcgcagttgatagaatctctcggtctggtgcaagtcaaaacttcctggttaaagacggtctcgttggggcagatgaagctccagcggtaggtggtgttgcggccggccgcggaccgcgtggtgaggcacacgtggaacacctggcactcgttgtccacgtccgcgtagtagccgtatgtgcggttctcgcaactgaaattgttagtgatattctgtcgtatcgatgatgcgttggccggaaggtccaactccatttgtgattgagacccatttcgtgaatccatttcccgtaacatcttcaagactgcactgctcctcaagttgaagtcttccacattacgcctggacggtagaccttcagatactgcgatgaaacaaatgacgacgaacgccgcgtatttcaccgccatctttttttgaggcttttaacttaatcacctaaataactgtaacttgaatccaataaccgttacaccatcacttcactatcacgaaaaaccgtctgtaaatctgaaactattccgacagatttcacacatatcccgacactcagcccggactgtgcgaatataatgtgaattctccttttataaacattgagaaggatcatccacggacggaattcacaatgagaaagtacataagtacggtatgcaaaaaaaaaaattttttttaaaaacaacggaacaacgaaaaaaaacca

SEQ ID NO: 608 - DNA, 1578 bp, Plutella xylostella
ggcggtggcggcggcggcggcggccggggcggctgatgtggatgataccgctgatgtctgcgatatctgcgagtcccgtctcgacagcggcggcggcggcggcgcctgcgcaggctccgccgggatgggcggcagcgggcggtcgatggacgcgccggcggtgagcggcgcgggcggcgggtcacgcgggggcccccccgggacggcgcccacgcgctcttcaggggacccagccacgctgctggagacggacccccgtgctaccggcttcgtgatggtgccgggacggcacacgttctgcatgcgctggaacaccaggtcagcgaggtggcggcggtcctcctcctgcgagtcgcccatgaaggaggtggcggagtcgttcagctcgatgatgtgctcgcgcccgtccttgccaacgactagctccagggcgcagacttcgaggccgccgaatatctcgctcacctcgtcgatccacatcttgtagcggtcgttcatgccgatggcctcgagcatggccgagccctggttggtcttccagttgcccgagatggacttgcgcatgaaagccttgtagttgttgccgatcttctgtatgtgtatgtcgtacttggcgtcgatgtagggctccaccgtgctgtaggtgcccagcatggacaccacgcccgcgatgtcctgaaaatcggtgatagtatccactttcactttagccacgccactgtgcgcgtgccctatcttgatcaccaccgggaacttcggggccgacaccatgtcggtgtggttgtggtagtaggtctgctcgatgagcgggaagttctcccggccgaggcgccgctgcagctgcagcaggtgcccgaacacccagggtcggtcctggaagtggtagatggagttgaggctattcagcgccggcacgcctccgaacttgaggccgagcagcagcgagcggtggtcggcgcccgcgtcgcgcacgttctgccgcaccagcacgaactccggcttgaagcacctggtgaccttggtgccgccgcggtacaccgccatcgacacgttggccccgtccgagttcgccgtcaccgacagctccctgaactcagcctgttcgacgcggatgtcccactcgccgggcaggcggcggccgcggaagtacttgctccagtccgtgttctggtcgtccaccacgagcagagtgacgcagcggtcgcggttgtacccgcgccccaccgatgccaccgatgttacgctcccaagtaaattggcgccctggtccctggcggcgccagtgagcgactgtacgcgctgcagcagcgactcccgcgacttggcgggggacgagggggcggaggtcccccgcgagcccccgcgcaagttcagcgacaagtcgccccccgccggggccgcgggggccgccggcgccgccgacgtgatggaagactggctgcttatacttccgcccgtcgcctgggaggtcggcctctggctctgcggcttgggctggctggtggtagccggctgccccgtgtaggggtccacctcgccctcatcgcactccgactgcagatctccagagctgaatct

SEQ ID NO: 609 - DNA, 1044 bp, Plutella xylostella
aaattatgaccttcgaattttctagttaaatcgtactaagaggaaaagtcaactcatggtaagcatactgaacaaattaaacgaagttgtaatgatccattaactgtattcaccagagcaaaagtatctccaatattttacgaagtatctctacaacacctcataacaaacaatcgataaccaatgatgtttataaaaaaaacatttgtacaaaattttattcttaaggaagttgacactagttcttagccctagcaaagatccgactcttgaagatgttgtcaatgcgacagaagacattgtcggctgcctgtgcggcatccactcgatagtgaagccccttcctcatgtaatagtcaataagaggaactgtctgggagtggtaggtggccaagcgcttcttcagtgcatccacattgtcgtcagatctttttatgagaggttcacctgtgacatcatcagtcatgggcttcctcggagggtggaactcttcgtggtagctgcggccgctgggcgggtggatgaggcggcccgtgatccgtctcaccagcaggctgtcgctgatgttgaactcaatcacagcatccaggccagttttccttctatgcagtagttcatccagcttctcagcctgtgggacggtcctagggaagccatcaagcaggaagccgttcttgcactccggggcatccaggttcttgtcaatcatatcaaccaccatctcgtcggagaccagtttcccctcatccatagtctttttcaggctccgtcctagttcagatccagacgccacctcagcgcggagcatgtccccagtagacaggtgacaaacacagtactttttttttagaaggggagcctgtgtccctttgccggagcccggaggtccaaggagaacggcattgattccaatagggtcatcgtttaggtagggtttaaggttcgtggctgctggggccatttttcaggacttctattcccgattaaattatgaacaaaaaagttttttagcagtacggacggcgacaggtgatgacgtcggtt

SEQ ID NO: 610 - DNA, 1425 bp, Plutella xylostella
gtttttttttttgagtattcttgaaaatttattaaaaactttgtacaaaatctttacttatcctaacttaaacaaatgagaaatgacttcaatcaatgttggcacagtattttttacttaaatcaataacctatgtagacatacatcgagctacctaaattggtaaaatatattgaagttaggtaggtgcctatacagggtgactcgggagacgtatactctgatggagacggtacctacgcttaacgccaacgcgctcccctgtgtgttcgctcaaaaaccaaccaaggtatctattatctatctactatgttcgtaaacgccacgaacttccaaaactagctgtatgtgtttgtatcataatactggggtagatacttatattgaacgttattttgaactaccgatgataaccgatcgatgtcagattaagtgatgttgcttgaggattgtcgattgctaatgctcggtggtggtagccccactggcatctttcgggtagtggtggtaaggtagctagtggcacccgcagctcttgacgaccatgttcttgtacttgcgcaggatgacgttggagtcgtccgtgtagtacagcacggatatcggggacagcttgatcggcgcgcatgacggcttgggcacctgtgaggggttgagcagatgcacgagcgtctgcacgatggcgtggttggtggcgttcttgtgcgcgttcagcgggaagttgcactcgcctgagcagtagaacgcgccgtagccgtctggagctattatccagtcctgccattccagatccttgaagctgacgtacagtgtttgaatttcacaacttctcgtggtccagtgagcagtatcattaagtggattcctcagaaagttgtccgaatacccctggctgcgccacctccgtgcctcgcgcttgcgcctggggccggggtccgcggcgccgagcctcgggccgcccttgaagaacgccaccacaaacggctgcttgccctccgccgccacgccgcgacgctcctccagacctacttcttcgggctttacgttgcgttcaggctgcgagtgcgggtgcacggtgacgaagaagccgcggttgtcggcgggcgcggtgagccaggcgcccagcgcgcccgtcacgttcagctccagccagccctccgcgccggccgacgtgttggtggccaccacgcgctccaactgcagacctcctttagaatccacactaataacccgatgcacgacaaccgtgtacagctctccagggttctcagcagccgtggaggcctggtgcagccgcagctcggccgtcagcagcgcggaggcgtcgcctggcgcgcccgccacctcgaaccacacgtgccgcccgtgcccgtgccgcagcgcgcccaggtggtgctttttgctttgaaatgtcataatgaggtc

SEQ ID NO: 611 - DNA, 2443 bp, Plutella xylostella
actgtctattcaaacattgaaatttggttgatggaggtagtttgacaaggtacaaaagtgtatagctacttatgcagctgaccgtacgtgcggatacactattaaatttactagtaggtaaatacttaaagtacttatatgacaaaatactatgtaatataccgttatcacacttataaaatacgaagcataaataatgtttattcacagaaatgtacaaattgcaagcattcacattcacaatcctctttccgcagctttctattgattttagcaaatcaactttagttccttcagcttcaaaaatattttgtaatttactttcgtattttgttgtgtcaaaaagcatctagcttaaagtgtgttttttaacaaaactatctcagtaactttgaatttgatctaccatgaaagatgataactagtcgacacatctaaacatgacttataacgacacctgtcctcgctgcacgggtcaattatcgacgtcaataaactcgtcaccgccaccaatcacagcgtatttatggcgtggcgaatctagataaagttacatacttttttctacgtcgataacggattcgtgccgcgggcactaagaatgattctcatgggtatgactgatagactgatttggatgaatctcaaacacggctgctgacggtggggatgtgaatgggctcgtctcactggctcttcggtttggtccccacggctccgtcggtggtcgataagaacgcaaactcagccttcttggatgcgaattgcatgaattcatcgtaggtgagcgtccctctctcctccacgtctgcttgctggaaggtgttggcggcgtcctcctggcacagcgcgaggcacttgcccgccgcctccacgaactgcgcttgcgtgaggcgacctgagccgttggtggagtataacttaaacgcataagctagcaagtgagagagcggctcgtgctgcagcgacaggaaggcggcgcacagcaggtagtcggggaagtagactagcccgctcgactgttggaatatctggtacaggcgcgcggcgtggctggacgcgggctggatgccgagcctgcgtgtgaactgagccgcgtccacccagcggtccgcgcctacagacccgcagatgtgtagttctagttgggacttctccagccctagagcctgcctgatctgctgcacctcccggcaggcggcggcggcggggatgccaagctgcttggcgcgagctatgaggcgacagtcgtcgtatgtgtagtctagcaccggcactcctagcgctttggccataacatctctgacgttcctggcatacagcttggggtcccgcttctcctcttcactcgggtggtacaccggcaggaactcgatctcacacgcgctgtgcacctgggtcagcgtcagccataggagcttgagggcgccaggcccctcccaggtccacgtgacggtgtccagcgagttcgggtagcggatggtgacgggctgcacgggcacgcccgggtagaacccgcccggcttgaacgtgatgaggcaggaacggttcgtgcaggtgccttcggggaagattagcacctgcggccagtcttccttcgacgtggctctggcgatgatctccttgatggtgttctgtcttgagttggggtcgtcgcgccacacgtacaccggctgcgtgtagtttattaactttccgacatagttatccatgctttccttccgcacgataactgaggacatcctagtggcatagactatgcaactgtcgaggaacgacgagtgtggggctaccacgagtatcggggcttcgctgcgggaggcctgcctgcctcgcaccgagatggccatgcccccggctaggtatgacatcttaccgatgaaacatatgagcggtttgagagaccttctccatcctgtcataggtgctcttctgagatcatcttcagttagaccataaagtcctatacacgccaggaaccacgctgtgacgatcaagtaacatataactattactcgaaaaggcaacaatattatggtgaatatggcggtctttattttgtcatatgtgttatctaattccaatttgtggacgaaggggttcaatatttcggcgcgcatgccgtcggatgtgaaagcgccactgccggtctcactatgcattttaccattcattttcacacagaagtgaaagatttggttgacccattaaattacagcacactttaaacacataacattttcatcggaacacataattactaagtattcacttcacgttttttaacaatctgcgacgtgtttacatccaaataaaaaaatgcgccacatcaatacgtttacatagcacactcgtctgagctaaactaaccgcaatattgaaagggagagagttgtagcttataccgttcattttaatgcaatcgtataggtcagcatcattt

SEQ ID NO: 612 - DNA, 1639 bp, Plutella xylostella
cccctattcaaggaaagatttcccggatattttatagtaagtacctaattcagtaggaaaacatagcttttaacgctgctttcataaagtgtccattgtaaaaacttttctcaactgtgtaggcgcactacataaaacttcaaagttgtattgtattccaacgcgctttattcaaaaggttcctttatactgggtttgtgtagggcttgcgaacaaatgtagttcctttttatgcatcagagaattctctaggtatgactaaaacagaatacgatcattcaataggctagccaggatctatgcggcattagattgtgtccgcaacttttgcttctaagagtttttctcaatcataaataattcttatgttaatcaatgattaatttgggccgtgtgtgtaaaaccaccaccccgcagctcgttccagtaaataggcctgtatctggtgactggctccttgaatgacgtcactggtgccttggtctccgtctgaagctcccgcctcttggcccgcacctcccgcgtcagcttgatggtgaagaagtagatgaattccagcaccgagacgaaactgaagcctgttacaaagccacacgtggagccgatgttactgaaaagatcaaaccacttcatgataacattttggccgtagcagtctgcgaactcgccggcatacttcacgtggacgatcgatgtttcgctgaaattggagcctcgtaaccacgcctccctatcgtaaatcgacgaggggttattcagcgtatccgggtccatcttgacgttattaaactcgtagttgtaggcggtcttggagcaggtgggcaggcactgcgggcaggagatgccgccgcggaccaagtccagctccagctctggcggaggcacgcgcaggtctggacgcacagtgatggattgagcataataaatccgaagacaatgcacatcagccaagttgcaggtgcgaatacccctcatgctgggcatattgaaaggagtgcagttgcacttcttgaccagaaacagcatccggcacttgagcatgcagtcgctgtgcgtgtagaagggcaggtacgaggactcgtcgtggaagagacagcctctcacgttcactgacacgtgttcgatgtcccgcgatgcttcggtgaggctcgctgttaccaacactgtcatttgcactgacggactgataatctgcacggaaaaacttccgctaggcgcatcaggaaaatcgtaggcatccgaaaactgcatctgtgccccaagaagtggaatgttgtaatagaagtcgtcgcttctatcatatctaagtaagactttcagtccttgatcaaaatcaaacgttgatttatttccaaagttatagctgtcgatatttctgtcgttgttatctctatcatcaaactcctcggagtcgcgcaagtagttgaaggtgcagcagtagccgttcatcgtcattcggaagtcgaacagctccgagcagttcatcgctttctcgttccaagaacaccgcagtaacaggctttcgcatgtgggtgttaaatttctcatgagcgttttagtgtcgtagtcacccaggatgtcatgtagttgctcaggatctgagagcgtcgctgacgagatcatttgcaggtcgtacagc

SEQ ID NO: 613 - DNA, 1236 bp, Plutella xylostella
tttttttagaaaaaccaacgtttattttacctgtaataaattatatcacttatagatacgtagttacatttgcgatcattcactgagtggtcctaacgaagtcgtgacgcggcggcggttgattggctgagagcgatgacgtcatcaatctagaggttcgacaggaagtgccatttgtcgacagtagcggggatgggctgcgcgacggccggcagcggcgccgcagccagcgcggcggcggccaccgcgcgctccactttgttggcgctgctctccactgtcacgttcaaggtggagatgtcgttagcttctgtcgcgccattcaccaggcccttccaaaactcgtgcacctcatcaatgactttgtacgcgaactcagcgttcttcgcctctccgtcgaaggcgaactggttgacgggcttgccgtccggcaccttgtacaggcggaaccactccaccgtggctttgagtagacctggatagtaagtctcgacgtcagccacatcgttcatcttggcggcgttggcgtccctggcgtcgatggccagcagcttccagtccgtctcgccctcgtcgatcagcgccagcgtgccgagaatcttcaccgggtacacgtcgccgcgggccgccacgcgagtgccgatctcgatcacgtctattgggtcgttgtcgccttttgcctgagtgccgggatcaatatgatgggggttctcccaggtctgtggcagtgctccgtagttccagatgtagccgtggtgcgggaacacgttggagacgaaccggagggcccccttctttgtgtcctgcttgatcgggttcagcttctccgataggctgatctccatcttggcgttgctccatcggggaacttccaccaccatgttcacgagcttggcggaacggtctgcccatagtggaatgtcgtggagtggtgagatcggaccgcactcatccttgaagaaaacccggtagtctggtgaataggctgagcctctttcttctgccacaaacatgctgctgtaagactgaaactgcacttgtctctgcaatgagcaactgttgtttcctgtgagcctggctataggcaaaactcgaccgggggtgctcagctgacggaaaaccgacacacaccgcaagccacaacgtgaaaatgacatttcggccgttccgttctgtcacttttttaatactagtgaagtgaatcatacaaaaaaattaaaacaatttatcgattac

SEQ ID NO: 614 - DNA, 3426 bp, Plutella xylostella
gccgttaagttttgtgccttgtgttgctgtaaaatatttaaataagtaagtaccacttaagtatccgcttcagctgtctttaccaaacgagtattattttcttagtcaattttgtcaagtcttcatatccgtatacattacaatccaacattatttatgtataactaattgtatcgatgtagtcgttaaattaatattgagtccattaacatgtcatggggaaaaatataaattgtcattttcacctgagatttccagttccaaagacctaaaacctaccagttctaacgttacagaaacacaatcgaaaatctctgaaaacatcatcacgtcatctagataaccgtatatttcaacatgaaagtatccttacgcaatgtccgaatcattaacatggctatgaaccagacgaataccaattagtatttggtggcgctgatttgtctgtctggtgagcgtgcggcgcatgcgcgtgggcatgggcctgggggtggtacaggtggaatgaagacggagggtggaagaactgagattggtctaacgttggcgcgtagtctaaaggcccaggcaccgccgaatacgcctgaggcttcaaaggtaaaggagcctcgcccaaatacgaatgccgcaacgcttcagaataagctgaattgtcatacgataaagcgtattgctgcttgtctcgcggagaaacggagccgggaggcgtcatagcggaatggtagtcggcgtaaccaccgtaagatgctaaagttcctaattcagttcctttatggcctagttggtctccatagcccgaaccttcactgccaggaggggtaggcaaaggtccagtttgaccatcactcgagtagtaaccccctgttctaccatcacctaagaaattacttctaatgacactttccctatttgcgtacaactgccgtagtagcgctgaggcgggagtcgtcgtgtggtttcccgggagctgtctgttcaagtgattcaaatgatggttctgcgtacctatccattgtattgttgacttctgctgctgctgttttagtagcgcgtcggtggagaaatctgttggtctatgcgatatttctttgccatctatagccggtagatgtttagacatggcattttctaagtctctaacggaagtagcgtcagttgcaccttcaggtacggttaaatttgatttggacatatcgcgttctatgggtgacatagcggccgcagggttagacgacgatttccgtctcgcttcttcatctctctcgctcgtttcctcgtcttcgattgtgtgctttcgtttcttgagtctccgagcgggcattggtgatgttttttctgtggttgtttggagaggtaaaggttgtgtatcacttagcctagttaggtgcgttacgtctgagtttggtgtttgtgcagtcgatgaggagtccgagggtgcaggaggttcggtccgctctgtgggatgtctcgggggcggcggaggtccgctggaattatcggtgtctggaggcccattttcgggatcgccggcgctttcttcccgcttcactccttgcacgctctcttctagctggcagcaatccatgacggtgttggcaaattctctgccactaataacgtaattgacacagatgatgttctgctcctcggcattcttcgacgagcagacaacggtcgcgcaagtctgcatccaggtgtaaccgccgagcttgttcattatcctgtagtagtgcgtcaggacttgacctttgtttattaagtccacatgacacttcctcagcttgttggcgtcctcgccgtggcacagagcgtataggttcttgcccgtgagctcctccgccgagtagccgagcagctccgacaccctgctgggctcgcaatgcgctatcctaaaatcgaagttgatccgcgtcacgaacatgtccgactccaatctgatctcatgcacggagggtggaggcagcgctatggccagcgccaccatgcccagcagggctggtggggacttccgactgtgagagaacgtgtactgcggccgcagccggcacagcattaggactacccgataacccgatgatttgaaatgacatcctcttttcgtaagtgtgctcttcattcttatgcaaaatgctcggtccatccctcggaataatgacccgctggctgctaacgtcatcgatgctgatacatccgggttattcgtgccatgctggctcccctcctcactccctgacgctggactgttcagacctgcgccaccgttcctgccagctagagacaggcccagctgctcggccacctcagcgtggtccgcctggtgcacgtagtcgaagatgctgctgccggtcatctctacttgtgataatcctaggtatatagaaacagtttcagatatgtacaggaaccgtccgtctgctgccacggacaacgcgaagccatccagggactgtaatatgtgggtgccttggtgctgctcaaacaagtctatggccatgcccagcggcgtccgcctgttttgagcacttttcaaagccttattactaggcggaggatcgcggctccacggcgggtccccgtgtcctgagaagtcccgcaacttgaggtagctgatcgtcagtctgatgatggacgccttgtccaactggctggtgatggctgccgggaggggcagcatcttggccagttcatagaactcgtagttctccttcccccggcgagacctcgctgcgtctctgctcttctccttgcgtagctcgagaatgccaggttcgagatgcgattggttggatgcttgttgctggcgacagatatccggggttgtctgtacgaaccaggaatgcgtgaaggcggggttcagcccggggttgagcccggggccagatcccggcagccccatcacccccggcagaccaccgggtcgctggtggtggtggaacgccgcgtagtccatggccacagcctggtaaggcaacatggtaacacttggtctctcagtctatgacagttctcacttcgcgcgctttttcacaactcatttcgtttgcaaagtttgagggttagggttcattgttggtttttggtcactttggttgtttggattgttgttggggtttgaaacttttggtcgagtcactagtaaatgttcaagtccggaatgtcacgggacattttgaagacacgtaaacaagagaccttctggctccgagacgttttcagttagcaaacaaaccgttctatttcgggagcgatcgtttacagggctagctattcacaggggaaaagtcacgcacaaccacccacttaataaatattctgggcatatatccgtttttacgcggacgtgaccggcggaggactgtccgctaccacgtacggtgcgcgccgacgattatcgaaaacagttgcatacgtccccctcctacgata

SEQ ID NO: 615 - DNA, 1433 bp, Plutella xylostella
ggcctatgccaagaaaagatctttcagagaagtgctctgatcaaaatctgagatgtatgtacttaaattaaaattactttagtgacaacttccactggtaaaccaagcttattaattagagctctatattagatcagcaacattcatgggcatctcatcaatctgcgtagagtagtactgctcaatatctctcaagatcctgatgtcatctgacttgacaaagttgatggcaacacctttgcgaccaaatcttcctgaacgaccaattctgtggatgtacagctcacggttgttgggcaagtcgtagttgatgacgagggacacttgctggacgtcaatacctctagcccagacatcagtggtgatcagcacacggctttgtccagatcggaattccttcataatattatctctctccttctgcggcatgtctccgtgcatggagctgacagtgaagttggcctcctgcatcttctgtgtcagccagtccacctttctcttggtgttgcagaagatgacagcctgcgtgatggtcagtgtgtcatacaggtcacacagtgtgtcaaacttccattcctccctctccacagctacgaagaactgctttataccttccagtgtcaactcgtcacgttttaccaagatcctgataggatcagtcatgaacttggatgtcatctccagtatctcgtggggcagtgtggctgaaatgagcaccacttgcgtcgccgggggcaagtaccggtacacatcatagatctgctccttgaaccccttgttcaacatctcgtcagcttcatcaagaaccaacattttgatggatcttgtcctcaggacacgccttctgatcatgtcaaatactcttccaggagtgccagatacaacatgctgaccataatccaatttccttatatcctctcccagattagtgccaccgatgcaggcatggcactgcacattcatgaagtctcccagagccaagataaccttctggatctgtgtggccagctcccgggtaggagacagcaccaacacttgcgtctcacgcagggtcgtgtccaacgactgcagaatggaaatggagaaagttgccgtttttccggtaccagactgagcctgagctatcacgtctctgcccttcacaataggctgaatgcttctctgctgaatcgcggacggcttttcgaaaccgtaagtgtatattcctcgcagcagctcgtcacgcaagcccatagaatcgaatgttggaataacttccacatcttcgctcgtgtcgaactcgacgttcgacaagtcctccgacataatcttgcgattaaacgatacttctgaagccgccatactttcactgttatgaaatattaatcacaataccattaaattttaatatttaattagtttccacgtttacagctcaaaaaacaaaattgtag

SEQ ID NO: 616 - DNA, 1203 bp, Plutella xylostella
tttggattcatcaaaacttatcaactaaatctatacctatacttacttaaaagttgctactttagtcatttgaaaaataaacagtcgcacaatatcacaagacgagccctgaatttgttaatcactaacacaagtttgatcgatcaatttataatagtttggacgaaaagtcattagatgctataagtttaaatcatcatcctcagattcatcatcgctagactcacccagcgctttatgaatctcatcctcgacttccatcgctgatatagacttgtcatctggcgccactttatggtacatcatcaagttagagtcatacttaccgcgacaacaaccaaactttttgaagacaaccgtcagcaggcagtacaaagaaatgcaactggcaataaacagagctatagacagaaatacgttcattttgtaatgccaattggcttcagtgatctgagggacgactgcgcttggatagcagtagagctttaactctgtatcagtttggttcaccagttgagcgtcttcaggacaggtctggcagtgatagttctgggggccggtgcaggccgcacaggtgtaatggcaagggagacagatcaggggagacttgacttgtccttgttccatgtcgtctgcttcggtcttgctcaaggggaacctcttctttttgggcccaacctcgagatacgtgaagtttcgtcgcctcgagcttcgttccgtcaacacctcgctggcgtaggtcccttctggacattttctgtagcaccgccctccgaataagtgcatacccttggagcattctaggcagtggaggggagactgcggcgagtgtgtggagcagccggaagatgtggacgcttcgctctcggccgcttttgacaagccgctgtcacggaccgtgtgagtatcgtgccacactagcgccatgtcatcttcgatggcgttgtgtggaacttcttccaccttgggtcggctccacggcttggccttctcaggatttggctccaaagaattattttcttgtgacacactctcttcatgaggtggtgtttccgtcccatagaatattagctcccactgggtcagcggtccggccatatatcgtccttcattggacacctcaagctgccagatgccgagcggggcctccccccacatgtggaccgacatgaagggccacgagttgaagccggcgcgggacga

SEQ ID NO: 617 - DNA, 696 bp, Plutella xylostella
tgtgttttacttttaagattgcacataacaaataaaatatgttaagcacaagttcgtttttcaattatcttcaaatgcgttatctaattagcatgattaaaagaataaactaaaacaacatcatcatttattgtttaaaataacacctaatcagcacataaataacaaccattaattaacgaaacaagctttaacttagtgatccttctcaacatcagtttccagatatttgttatactgttcttctgacattagattcttaatttcctcattatccgataggcttattttaaacaaccaaccctcatcatagcaggacgtgttgatgaggccaggtttgtcttctacattcttattcttctcagttacagtaccacttactggtgagtagacttcactagcagctttcacactttctagggctccgcattcatcaccagccttgaactgagcacctggctccggcagttgagcgaacaccacgtctcctagtgcttcttgtgcgtatttgctaatgcccaccgtgccgactccgttgtttatgactacccactcgtggcggtctgtgtattgtctagctacaggtttcgtactgtatttgtgccgcagttcacagtatgactgcttcaggttggtctgcaggacacaacaccgggacatgtactgctttgacgcgtggatgaagtatctttgcaa

SEQ ID NO: 618 - DNA, 1684 bp, Plutella xylostella
ttataaatattaaattataaatcgtagatgttttattggcatgcattacttaaatatttttcgaagaagaacattatttaaaccaaatataaaattttgtgacatttctcttgtttaaaatgcctttttgtgctctttaatccttatggcttttcagatatttctgtgctccaaataaataacaacattatgcttaatcgagaccgcacacgtataaatgtaaaaaataaataaatacaatcgatacttacaacacttacaagcttcacattgcgcaacaatcaaaagttcgtttacatctcactagatgtcactacaatcggccaatcacatgccgtcatcacttcacacactcgcctgattagctagcagcgccatctagtggtttttatgttggttattttacatggacttcatctgtgccatgagttcttccagcgacagctccgaggccgccaccgcgccgcccgtgctcgactccggagtgctgttgtctacgggaatgttgtacgccacctgaattccttccgctagattcaagttcgtaggggtttcctctactggagaattctcgtctactaaactgataccccactcattctcgtcgtgcagcggcttggtgtcctccagcacctccgtggcgacctcgactagcggccgcgcgcgggcctcggtctgtcgggcgcggcagtgggcgtcgtcgcagtgcgggttgggctttaaactcatggtagggaagaagtcagtcaatgcactgtagcccaggtagtgagtgacatttccaaatcctaagagatgcttcagcgtgttttgtactaagaacccggcgactatgcccatggtggtgggcaggctggccgcgcagactccctcccgtttcaaagtcttctcgtctatctttgacgccaccactagcggcggggcacaagcaaagcaagccgtctccccgggcacaatgaactgtatgtgcccagacacagcgttctcgctgactccggactcgaaccacttctgcttcagctcattgcaggctgtgttgatggccatgcgcgcctcgaagttgtccacgcagctcagcaccaggtccaccggcccggaggtgaggctgcctgtgttaatagtatcacagaacttctgaaagttatccaccgtggtaatgttataattgtatgcgtcaatctgtacatcggggttgatattctgaagcgtggcggcggcagcatccaccttgctgagccccgcctggtgcggctggaagaacagccggttcatgttcgccagctccactttgtcatagtcaaacaggatcaacttgccaatgccgcacctggtgagcatctccgcggtgacgctgcccactccgcccacgcccaccaccgccaccgacaagtctcggatcttctcatagttatccactatacccatcctcttcagggccattagacgactgtaaggatttgagtctactacttcggaggacatcacatcaattttctgccgcactggtccggcatttccctgaatggaggcgagcttggcttccagctctttcactttatgctgcaattcttccaccgtaggcatttttagtctttaatcgcaaaaattaattaattttcaaacactttcactgaaaacttttcgatttgttggcaaaaaatctcaatctaaactgtcagtgtca

SEQ ID NO: 619 - DNA, 1823 bp, Plutella xylostella
acacgctacaggtacattaaattcattacaatttaacttttgcgcattgcaataattttggtgattcacattttcacattgcaaacatacatctatattattgtttcatcagttaattaagttcggagaaaggcggttaggcggtaatctgttaatcaaactctttggcacttcttaaaacatacagacgaattgagaacctcctcctaattttaaagtcggataaaaatgcatttctatattcaaatctatcgtctagaagtctagctcaaaaattaacaccaaagagttgcaacatctagtaatttcgtcaacgtgtgtagccgcccttagctccttagttcgcatagctatatcttccttctagaaggtgcttagttcttcttctcttccttcttgtcgtcctcggacgggggagtctcggtctgctgctgttggttgttgccttccctctcagccgccatcttcttgtaggcctgctcgaacagcttgaggctggcctgctgcagcgcgccggtcgccttgcggatgtcctcggggtcggcctcgtccttcttggctaagaggtcgcgcagcgcggtgatttctgtcttgagcttgtcgcactcctcctgcggcagctgcgccttgtactcgtccatcttggtctcggtgtcatgaagcacgccctccgcctggttggacacctcgaccctctcccggcgttgcttgtcggcggcggcgaacttctccgcggctttcaccatgttctcgatctcgtccttggagagacctccggaggactggatcacgatctgttgctccttgccggtgcccttgtcgcgcgcgctcacgtgcacgatgccgttggcgtcgatgtcgaatgtcacctccacctgtgggacgcccctgggcgcgggcgggatgcccacgagcgagaactggcccagcatcttgttgtcggcggccatctcgcgctcgccctggtgcaccttgatctccacttgggtctggccgtcggcggctgtggagaagacctggctcttcttggtggggatggtggtgttcctggtgatgagcttggtgaacactccgccgagggtctcgatgccgagcgacaggggcgtcacgtccagtaggaggatgtcggtcacgtcgcccgctagcacgccaccttgcacagcggcgcccacagcgaccgcctcgtcggggttgacggcgcgggacggcgcgcgcccgaagatctcctgcacggtcgattgtaccttgggcatcctagtcatgcctccaacaagtaggacctcgccgatgtcggtgcgggtgacctcggcgtcctgcagcgcgcgctggcagggcgccaccgtgcgcttgatcaggtcgcccactagggactccagcttggaacgggtcatcttgaggttcatgtgcttgggcccggcggcgtccatggtgaggtagggcaggttgatgtcggtctgcacggacccggagagctcgatcttggccttctccgccgcctccttgagccgctgcatcgccatcgcgtctttgcggaggtctatgccttgatccttcttaaactcatcgaccaggaagttgacgagcacgttgtcgaagtcctcgcctcctaaaagcgtgtctccgttggtggacttcacctcgaacacgcccttttggatctcgagcaccgagatgtcgaaggtgccgccgccgaggtcgtatactgcgatgatcttgtcatcagtcttgtccatgccgtacgcgagcgcggcggcggtgggctcgttgatcactcgcagcacgttcagaccagagatttgaccagcatccttagtagcctgtcg

SEQ ID NO: 620 - DNA, 1425 bp, Plutella xylostella
taaaatattcttttaataaaataaacatttacaaactgtgctataactttgacttatacctaaaataataaaccaaaattctctgtatacaaggctagacttacatagttctgttattgaaatcaacataatttcatcatctgatttcggatcactcttcgttcagctttataatactttatgcgattgataaaatacttaaaactaaatacattttcaagaacatttcacattatttttatctacactgtttagtgactactatcaaacattaggtgcaacccagttcagaaatttaatggccatttcaaaaccaaggaagcaggcagcatttgcagggaaagctctcagcatcaccggagtcacacctttgtagagagccagtggaccttccttctccatcagctgtttgaaaacatctctgattccattaggatacgtcccttctggggcggtctgaagacggctctttagaacatcagcaggcattgcaacaatccagttaccaataccagcacacccgcctgcggtaatggctgccaacatcttcacctgggcactggcatcttctgggattagcttctctttcactaactcataagtcatgaagtagacaccgctagcaggcacatctctcaatatagtagcaacactgcccttgtatatgcttctgatgcctccttcagcgtaaagctgcttggcgcagtcggccatgccgctgtacttcttgggtgcattgcctccttgctgaatttgaagcagacacttgattcgttctccaggggccatgattgatgttgtgaagatcccagagaatgcaccggcagcaaacagttccgttttcgaaagaggttctgtgctttcgcctttaataagtttcttaccaagtccaaagccaaagaaactgatggcgaaaattggcgctactccagttaaaggtgctgacatacctttgtagaggccacggaacccttcctgcttcactgtcttagagaagcagtcccaggtgcccccatacaatggtttttcgccaggtttgggcaaaggcattgtttgtagacgtactttgacggtgtccatcggatgtccagctaacaccgtgcagacacctccgaaaccaccactcaagaagtatttaaaagggctactttgttcagacattttcccgtttatttaataactttcacaccactaaaattgaatttctacaacttaaaaatacaacagctgataaatagtcagctgtcattaactcggaagacaaagtccattttccacaagttccgcaacggatttttgtagattgtaaccttgtgcctttattgtaataaatattatgcccgttctcgtcctccaattcagccagtctttagttcaagaacataagtaatgaaacgttcaagagaaagttgacttgaaattcat

SEQ ID NO: 621 - DNA, 1764 bp, Plutella xylostella
ctggcttttccctgactatccctgactttccagaaagtggacaccctgtttagagtcctgcaaacttcctgacacacaatcttactaaaatacaacattttggtgttcataatctcaactcgagttaaaaataaatacgtatcgtaatacacactttattgcgcgatcacttcaaacacagttccactgtcacattcgcactataggcacaacacttcataagaggccgcgtgttaaaccctgattacacctaccgagtagcgagacagtatcttcggccgaacctcgaccaatcaacggctagcaattgaccaagtagtcgaccgaggatactgtctcggctctactaggtgtaacgagggtattatctttggatggcgcgtcactgcaggctggctggcctgcgggcgtcgggctattgcagggagttgtcgggcagacggtgcgcgtcgtggtgccacgtggccgagggctcgggcctcatgacgtcatccacaggggtgcaagcaggccgcggccccggctcaggggtatacgtgaacgtcaaccccgtcgcgtaaattatcccgtcattacgcaccaaagacactggaacctgcgtaggctgtcgcacccacagccactgccctctaaactgactgatatcgggcaccacacacagcatggactcggcacaccggtacatggtctccgcttccacgtcaccgaaccacacttgcagggacggggtgaagttgtctccagccagctccagcatggccacgtcaccgccgccgttgaggttcagcgagtggaccagaggcaccggggtcacgggggatctgacaggtcccatgccttcatagaactgatactctgctttatctgtagagatgatggtccagcacgctccatcgttgatcatctccttgttaggttccttcgggcatggagtggcctggaactgaatgatcctctcttgcgacagacagagatacatccgctcagtatccttcatgtagaatgcacacttgtggagttgggagacggggtcgtctgcttctaagagtgccatttgtttgtccacctttcttattataagcctgggcaaggccatgccagtcacagagcagaccagtttcacagtggaaccatagtgcacatatccatctctcactgcaaactcctccgactcactctcattgtcatccagtaggtggatggtgaacgccccccactgtgtggatgacgcatggaagtttccattctctacatgcaagtaccgggtggacacggtctgtgaccgcagcctgttgaacagcgccaccttggtcccactcgctatgcacaagtctgcatttttcaaggactgcttcttctttgaaggctttgatataacttttattctcttactattaaatataccaatatcatgtccatttccgtagaacattttcactgagagcataaaatgctttctcttgtcagagtctgatatgtacaaggttttggcggcacagtactgcttgccattgttgaggtcgagctgctgcatgtcttggtcggagttgccgatgccaatgaaggcacagagctgtgccgcctgctccgtctcgccctcccgcagcatgcgctcgcgccgcagccgccagccgtccccgaacaggtagatgcagggaggggggcagaagaacctcttctcgttgccgtaggacttctgcgcgacctttgcgtgaaggatgaccaccaccatgtcggagcggtcgcgcaggtagcgctccatgg

SEQ ID NO: 622 - DNA, 1651 bp, Plutella xylostella
cttttccctagcttattaagtatgaaatggaaagtaatgtaaactcaaattatcaggattagtatttaagagcaggagagaatatattaaccattattactattaagttttgaatattacaacagtaaggtaaaacaaatcaaattaagctcatcaaaaatagttttccttcaatttgaactgaaatttaatggttactttgatattattttatataattttaatgctacaaatttacacacaggcctacgacaacttcttagctttctgataaagagtatcaactactttgctcatatgatggatggtttccaggacagtctcataggttttctccaagggggattcatcaaaaactataagtacaccctctccttggtctaagatgccatttagcttcttgtccaaaatcatttgtgacagtttcttctccacctggatgacggggaggcggatggagcgtgccacgtgttccacctgcactcgcatgtagggctccacgatgcggcacaggttctgctccaacatggtgtcatacagggctccgaggtgagcccgcaccaccgcatcctcttctaactcaggcttgtatgattttaaagcagcttggaagtcagctagtgacctcttgtgagaagcggtagcgacagcccgcatcgcttccagttccttacctgcatatttcaaagcagttttgctcccacatactactgccacttcttctgcctgattcaacatgatctttgacaacaacatgtacttcaagcctgttagagctttcggactatcagcaccatcatatccttcgaaagcttcatagaagtatgagtaagcggttttaaaatcgcgttcgtcggccgcgtgtaggatgcctgattgcaggtcgagggctgcttgcattttggggggacagtagatggcgttagctgtggttcgggcagatgtaagtgaggcacgggctttaggtaggttgctaagggcatggtatgttttgctctcaagcaacagcacctcaaccagcaggttcttgtcgtcgagcttcttgagctcgcgcagcagcgccgtggccagctcgagcgcctccgagtgcatgccggtgtcgtagtacagcgccacgagccgcgcctccagcgactgccgcaggaacgtgcgccgctcctccttggcccactcgatgcactccttgcatagctgcacctctatcccggtcccggcttccaagtcgaggaagaaatcaaccagcgaacgcaccaacttggcagctttcgctttgctgatcaaacttagaaatggcctcgtagcttttatgagctcggccagttcttgggctttaccttctttcttgtacttttcgccgaggtttaagataccctgctccttagcacgtatgttttcttcatcatcctcgggcacttcaccagtgctaaccatcttgtcgatcatgcggacgtcttcgtccctctttgtcgacgagacgcgtgacctctcgaataacattgcaccggccatgctgggtatatttatacgcttatgctaaaaacactataaaatcgcagaacaacggttgattacacttttctcctttgtaaacgcaaagtcatcgacggcctcttttttcggaaacaagtcgtatcgtatggtagacgcgagc

SEQ ID NO: 623 - DNA, 734 bp, Plutella xylostella
cattggacacggtgatctgaatctgactcttgtctatggtctctttctctattcttggttccgctcctcattggacacggtgatctgaatctgactcttgtctatggtctctttctctattcttggttccgctcctccgtcaccaggtggctctgtctttattcgagcttgtttcggcttggattctgaggtatcacattccttgttctccttccacacggccggctggtcggagtagacctccttcttccagatggccacggaggccttgagggtgtcgatgcagtgcgccacggccgccagcgactcctgacggtgtgggctgctgatggcgatgaccactgacgcctcccgcgcgggaactatgccgagcctgtgatagatggcaatgccatgcacactgctccattttcctcttatttcttcacatattgatttcaaagccttcagtgccatcggctcgtaggcttcatattccaacttggtcacctgtttcccttcaaagttgtctcgagtagtgccaataaataaagaaactgccccgcagctgtcatcaatcacaaggttacttatttcttctacgcttaatttgtctactgttaacttcaagtggtccatattgactctagttttagattgaatgataaattattttatcctccactgagtggtgggattacagctatgctatctctttctctcacttctatgtcctgggtatcatcacagatttc

SEQ ID NO: 624 - DNA, 2475 bp, Plutella xylostella
cgggggcgggggggagcgggaccagcgccagcagctgcaggtgcggccggaatatgcactcctgcgcttctagatcagaagagttgtcgaacagttcccgcagcatgccgacacacgtggacgcgacgcggaccttgaacccgtcggtgaactcgtcggtgaacaggtcgccggcggccatcttgtccgcgccggacagcagcggacagtccgcggacaggcgcagcagccccgcgtcgcgcgcgcggaacggcgggaccacctgtagccgactgactacaggaatgtccgcggccatgtacaggaggccgcggaggaagttgatcacgggcgggacgaggcgcttcgatagcgcagtgtactcgaggatcagggcggctacgaacaagccccgggatatcgactgtgggtcccggaacctgccccgggtgaggatctgctgcatgaacaccagcgcgggcgtggcgaccggatgacggtagtctgagcctgggtacagtagagatactagcttgaacagtaccagtgtgtctagatctggcactcgcttcggacatttcaagaacaagtcgtgcttctctttcagcacctcgacgatacacttcatggacgacaccttgttgaccttggccaggtcgtacagtatgggcgcgaggtggtgcagcgtgcgcgcggcgtgggacacccccgcggccgaggcgggggcgccccacgcgtcgtggatgaactggaccacgtacgggaacagctgggacagcttctccttgttcccctctcctttagaggggtcgtactgcttcacgagccgcgccagcgcagccgcctgcgccgccggggacttgtccgacagcagcgccttcagcttgtacccctcggtggacattgtcttgaagaaggtggatatccgctggtcgtcctccgcccgctgttcctcgtcctcactctccgcctctgactccaacaacactcgtaaattacttatatcatctactttattttcatttattttctcactttctgccggctctgtatcggtatcactgtcactttcacttgaattttcttttggtgaactatttgttttagcagtattaattttcttgctatcattgttcttctcactgtttttctcctctgtttcatcgtcatcatcatcatctgttgtttcattgtctttatcatcatcaccgtcatttttatcttcatcttcatcatcatcgtcctcatcagatgtttgattttgaaaaagtatgctagtttcatttggtttagcttctttgctttttttatcaatcttttttgtagatgttttgtcggcaggagtctgttcatcgtcatcatcgtcatcatcgtcatcatcatcatcttccccctcgccgctcccctcctccccttcctcttcatcagacgattcatcagagccgccatcttgaaattgcttcttttcacttggaaatccagaatgttgcgtaagcaccgcctcgtccccgagcgctcgtccctcgtcgtcgtacgccagcatgaagcccggcgccgccgcctccagctcaaggttgtcgtctagatcctccgcagacctgtgcatgtgtgcgggcgcggccccctccccctcctccccccgcatgcgtctgtctcgctctctctgccacgccgccagctgcttcctctcttcttcctcttgggcttcttggctcttcagaccgtccgacggggtgcctctcttctcgaaccgcagctccctcgtcatctgatcatagtcgagcgccgcccgctccgcccgcgtgaggggggcgggggggtcgccgccgaagtggccctccgacacgaactcgtcatctaagccacggaatgctttccggccatcatcatcatcttcatcatctgaggatcttgggtcatcaaacttttctatctgctccaatgtctgccctctgtgtgtgagcagctcgtcgtcggccaggttgtagagcgcggggcgcgggcggcgcgcgcgctccgccgcgaacctcgccgtggcgcgctcctccgccgacagcgccgagtccttctccccgatgcgccggtccgtgaacacgttcgtcttgtgcatcagcttcatctctgtgccgagggtttctttacgcttctgcacggcgcgcgcgcgcgcgacgcccggcatgccgcgctcgtgcttggacttctgccccagcaccttcatcttctctctgttgatgtgcacctcgaaaggattcaactttttcttgtgaacatcgccttttctcttgttgtgaactttgtcagcaagtcctgagtttcgtttatttttagctttcgccatgtttaacgaagccttatatttatgtaatttatttagtgaaagaggccacagttaattcaactttgttttagttattacacaaaacaccatttgtttttgacaaattttgaggttaagtattttgcatgtgttttgacgtttacacgcgtgtttttgac

SEQ ID NO: 625 - DNA, 2022 bp, Plutella xylostella
tcataaagtaattcctaactataataaataactaactaccgcttcaatttatacacctttacaatgtaataaaatgtcaaaaagtatgtaggtatatcgttactcaaaacatccacacactctctttacctataccacactaacaccaacaacaaatcagcattgttttcaatgttccctcatcatttaaccgacttcaaaaaaaggaggagtttctatcctaatgcccattttcaacatagtctgttagatcatgaacacccctgtaacattgtaaagtcatcaattatacgtcatatctatattaattttttaacagctatgtcaaaagtcagcaactaatccctggttatgatctaacagactattttgaaactggcgctaagtcttcaatacagccagcagtggtgatcgctaccgcttggactgttcagtgccgatggcctcggcttccgccagggtgtcgggcatgctggtgccgagcgtctccggctgcgtgagcaccagcagaccggccagcagacccatgccgccgaataacatcgatggtagacccgtccagatgtccctcaaagcaggagtgagcggcgcagtgatggacccgactctcccgatcatggaggagaaggcgagcagactgtggcggtattcagtgggatacagctccgatgtgaagagatacagtgacgtgaacaccacggagataccgaacttgccaatcaggaacagtacgaggcggaccgtcgtttgttcatcatcaatgaaagcgaaggcaatattgcacgcagcactcaagaagtatccaaaagtgagggtaggcttcctgccaatcctgttcaaaatgagcacagccgtggcgaagccggggatctcgatggcgcagacgtagatgtagttgaggtatatgttgcccgagagcccggtggagttgatggacagcccgtagtacacgaaggtggtggtgacccaccagatcggcgtggtgcagacgcggcgcaggaggatgcgggagctgccgatcgctcttaggaggctgggcttctcttcttcggatttctcatcagtcttctccagagccggcggattacacagcgcatttagagacgcatcgctgatctgtttcctgttcactctggcaactttttccaggatttctttggcttcttggaacctcttcttggagagcagccagcggacactttcgggcaggatccagtagtagccgatgatgatgaagcaggggatgtggagagccatgatcatgtagcgccagggctggatgagccacgctacggagcccaggatcacctggcccaccgcgaacatggaggaacagatggcgctggccagcacacgatatttcggtcccactagctccgttgcaaaaacataagcggagctgaaggtgccagcccccagggtggtctgcataatctgcagcgtgaggtacatggcgtagttgacggagaaggcccgcacgaggccgatgagcgccaggttgaacacgctgactatgagcgccacgcggcggccgaagcggtcggacacgtagccggtgaagggcaggacgaggagggtgcccacgctagagagcgtgccggccaacgctcgcagccactcttggcattccaggccaaaatcataaaccacagagttagtcttcccatacacatactcctcacaatccacttgcgtgttcctatcgaacaggctagcagggcaggtgttggggggcggcgccacggtggtgttgctcagcagggcgaagcggcggcagttggagaagcccctgccctggacggctggcagggcgttgagggcccacgagggctcgtagaccgggtcggggccgtcgcactcggggatcgcacatctgtgtggcacgttggcagcggagaagatgtactcgctcatgaaggcagacatgatgatggggagagacaccagcaggatgttgaagacctggtagcggccgaactggcccagctcattcaccagcacatcgtccaggtccacagactt

SEQ ID NO: 626 - DNA, 16218 bp, Plutella xylostella
taatttatagcgtttattaaatacttttcacataaaggtaacatacaaaaaaaataaaccttaaattaaatatgtgtaggcacaaaaaatatttcataaaaaactgacgcgcctaatacaaaattacaattagataaaacatacaacacaattaaatttttacaatatcgtgcacttaatgtggctaaagataattttaacgttaaactataaaatctcattcaattcggatttgtacttgcagaaaaaaacattaggtcatgaacatcggcattgatcagaacatagaaactggcaaggcaagtaatgcgtgcgtacttttagtaacgagtcgtagtgatggggtactgtcgactcagtagggttgtttctttgtcagagaggggcggagcgcgggcgcggggcgcggggcgcggggcggtacgagtaactttgccgcgacggacgcggccacgcacggacaagtgacacgatcaaagttagtcgtagcggttagaggccgcagggccgcaccgcagccgccctgcagccgagttacaggatacaggtccttatgataaagccaaaatcaacaactggacaatacaacagaactcatgctgaacatacagatacaggtacttgtaacaagtgcttccttttatcgaaactatagctacaacaaacattaatttatattttggttaaattagtaattttgatacttacttacatctattttacaaaggaacaggactcgaaacaaattcccaatatcaataggtgtctagtgtgaaaatattaatgtctaaaaatcacgatgagatcaataagtatgtgctggtcagatctcaataaaaaagaagcggaaagtacctttatcattgacaaagttgttaattaggcaaaataattattcgttacttcttatacacaggttataatttttaaagagagtattgggtgaaaaatacatttgacgatttgccaaaagacgcgtcctgcgtactgcgcagcctgtttacagtaaaactaatgaacctgacgatccagatataatacatcgtttagtagacatcgtagcggtaaaagcaaaacaaaacagtcgtataatgtttcgtgtagatgttaatgacatgttacgtgacgtcgccgcggagaccggctgctgctcggggctgtcctccgttctcgtctgctccaacaatcactacgctatttacacaaaaagctcaatgtacagcattgttagatgcggaaattcgctcaaaatatatggctactgagttaagttgaacaattgagttcatttgtaatgtattgttagagtgtgccggtgcgggcgcggccggcgacgcgtctctgacagtacgcgtccgcgcactatacccactccctgcgacttgtacgaggcgggtgacaagttattgcgcgaaccgctacgattgtgcatactttagttcttaattcatgatactacgcgctggtcaatacaaatttgaaaagtagttttcacccgatctcatttggttgatagtttgaaacaaagaaacactacattaataaattaaaagtgcgcgacgcgtgctcgctgcctgaatctatgtcttacttttgacgactagtttagccgaggactcgacctggccggcggcggtggtggcgcggcaggtgaacgtgcccgagtcctcctcgtacgtgttgccgatcaacagcaccgcgttgttgccctcatggatcatctgaaaatctggtgtctctgggattagtgcaccttcgcgaagccactggatggtcggcttgattttgctggtgatgttggtcttgaactgagcaggctgcccctcgttgacgacgacgtcgcgtaatggcgtcagggtgggaaggatatcggcctggtccggttgagataccttcagcttggctgccccagtcacacggccggcggagttgtaagcgacacacttgtagtctccttcgtcttctgggaacgcttccgatatacgtaaagtatattcatcggctgctcttgacatttggaagtattttgagggcttaatcagattttcacccttataccattgcacagtaggagttggtttgcctacaattttgcagctaaactcaataccttgcccctcagctaccactttatcttttagtggctcaataatttctgggggtgagttggcagccttcgattgagattttggcttctcttttgtggcaggagcgttaacgtagcactcagcgtcgcaccgagcctcaccagcgctgttgatggctacacattcatattttcctgagtcttgcgggtatgcttcgagtatcaaaagagtgtatgtgccatcttcatctaaaattttattcctgatatcaggttggatcttcttcccattctttagccaatatacatcaataggcttcgttccagtcactttagtatcaaaccttactagttgactagcagttacgttaacactttgagctgtcaatgtgaagcttggtggaattacgccgcctctaccctggcgccttcgttcttcaactactaagttggcgctacatttggcagtgccacctcggttttctgctacagccgcgaataccgctgagtcttccaggaaaacttgacgtatgatcaacacagatttggtgctgaatgtgtgaatttggaagtcaggtgaatttttgatcgggaagttttctctgtaccacttaatagtgggaagtggatctccatcaaattcaacttcaaatttggcctgttcctgttcaaatactcggcacggttgcatcttctttgtgaacactggaggcttgctcggctttaccggtccttcgaccactcgttcctgagtttgagctttgtgttccacttccgtagtttcggtggacgtaattttacgagttatctcagtgtcaccaacgacttccttttgtatttgcttttgcttagcgacatgaacctcttttccatgaactgtggattctgaaggatcaggtatctttggcttcttaaccttcttttgcactttttgttgtgtttcttggacttcttcagattgctctaagctactctgatatttctgagccattcctttcgcaactgagctgctgacaaccttttccccgggtatggcatattggtgagtagattccctgtgcctactttccttaataacctgttcgttttctaattcctgtagcttgttgtagtactcttccctcttcttcttctttacagattgttgccattcagtttctggctctttaatgacctttgcctttaactcgggcctatgatctataactccctgacgttgcaatgtttgcctctcttcaaaggtcttttctaattccgtgtcagttcgctggtactgagtagattcatcataccaaggtcgtggcgcattcttgagtacacctcggtaatcatcgtgtcttgggatgaccttcagctcagtagctgctacggcttcacctgcagagctcctggcgatgacttcaatctttccagtatcgtattgtctcgtcttaggtatatcgaagtggtacatgccatcatacgtcagtttgtatcttgatccattgacaatagtgtttccgttgatgacccacataactcttggcttaggatgtcctgttacgcggcactggaaacgtgcccattcgccttcttccacagtgcatgggtcaggtctgctgacaaacacaggcgcgcaacgagctttgatatcatccggtggttgttcaggaacaacttgccaagatgcttccatctctctaatcttttctatgctcttcatgtgtttaggcagttgagagtcgtatacgataccaggtttgccggcagtcttaattatggctctcgtttcatccataccatataagtttgtggctctgcaaacatattcgccactgtcctcgggatatacccagccgaagttcatggctacatatccaaagtcgtagatcggtgtgaagcgattcttgtgcagtaacggttttccgttaaagaaccattccaccttcatgtttggatcaccgacaggtgaaagttgacattcaaatttagtggtttccatttctactaacgtagtctgactcacgatctgagtaacaaagcgtggaggttgttttttgtcaacatcgtaaagatcatcttcagtgagatgaatttcagaagtgtatttttttatcgtcgcctccatctgtgttaaagcttctgacttcttcataccacgaggtacctggttctgcagtataatatccggcagttgtttgcaggatatggttccacgcgtcatatcttctccaaagtcattgacggcgcgacagatgtactcgccagaatcttcagcgtacacgtataaaatgtcaagggaaacaaagcccatgtcatacactgtgcggtaacggtgaccagatggtagcaattttccattgcggtaccattcaatgcgaagttttgcatcttctttcggttctactctgcattcgaaccgaacaccttctgattcttctaccgtatgagattgaatttgtgtaataaacttgggtggcgtgtttaccactttgtcttcaacaggagcgtcactgatttttcctctttctagttctttaattttctctccactcataccctgtgggagttgagattctaatacgatatcgcgtttcgcgctgcaagttattttagcagttgtagtagctgagccccacttgttggtggctcggcatgtgtattcaccagaatcgcgggcataaatgtaatcgatgtccaaagcaataaatccaaaatcgttgagcatgtgaactcgagaaccagtcgcaaacggcctgccgttatggaaccagtcaattctcatagatggatcgccaacgggctcaacgcgacagtcgaagtgtattggtcctccttctggtatatcaatgttgtcctttatctcgactatgaattttggtggatttggtttttcatcttccaatgtcagctcctctcgcttatgtaaagtttcctcgagtttttggatgctctcggttccagatttgaaatgagatggtagctgcggttctagaacaatgccctgtctacccttaacttgtaatttacaggaaacagtggcttctccatggcggttggtggccttgcaagtgtaaagaccagcatctcgttggtagactccagccacctcaagaatgacgaaaccaaaatcgttaatagtcttgaccctagatccagtcaagagtggctttccgttatggaaccattccaccctcatactagagtcattaattggaatcaaacggcattcgaagtgagctgaagagttttctgccagaatcaaatcagaaggcgttgttgtgaattctggagggctaccaccttcttcctcagggcccgtacgatccacgaccgcattgtatccttccaaagcagcaattttgtcaatcgttccttccatacccttaggcaattgtgattccaaaataatgttccgtttaccggttactttcatagatgcggtggtaaccgcctcaccgtagttgttgtaagctctgcaagagtattcaccggaatcctcggggtatgttggtgatatttcaagaataacaaatccaaagtcgcagaaggtcctgaatcttgatccagctttgagtgactttccattccaataccattccacctttaagttggggtcatccgttggtatcagacgcgcttcgaaatgagcattctctccttccctcaagttatcaatatttgataatggaacagtaaacatcggagcttttccacgctcttcttctttcgtgacatccgtccttcgaatcatggaatcttctaaagtttgaagcttttctaaacctccttccatgccccgcggtagttgcgagtccaggatcaaactttctttcgatgcacattttaacgtagccttggtagagtctcttcctaacttgttagtagccacgcattcataaacgcctgaattttcttcgtaacagtagagaatgtccaagataacgataccaaaatcgtggaatgttctgtatctgtgtccatgaggtaactttttgccgttgtagaaccattcaactgttaggtcaggatcatcaactggagtaagacgagcttcgaaatgcgcactctgtccttcaatcagtttagtcacatcagcaatttgtgtaatgaacttcggaggctcagcagatggcgtcgaaggtgcctgctgttgtgctccatggaggctttctaactccctgatcttggccaaagaatctggttgaaggctgtccaaaaatacacctcctctgccgtaacacgctatggtagcttttgtgaaatcttctccatacttgttgtatgcacggcagacatattcgccagcatcgtgattttgagtgtaagctatgtctaaaactacgaaaccgaagtctgacacagtttttattctattcgagtgacggagaggttggccattatggtaccattctatctttaattctgggtcatcgactggcacaactgtgcattcaaagtgagccgattgcccgtcctttagtccagctatattttgaatctgtgttgtgaacttgggtttctgtcctttgctcttgtctacgcattctaattttacactgatttcagcttgtccccacttgttagtagctcgacaagaatatatacctgaatcagcaatcttagttcccagtatttctaaaacaaccataccgaacgcataaactgttcgaattcgatggcttgcttcaatacatttgccattgtagaaccattctatgaccatgctttgatcaccagtaggtatcaaggaagcttcgtaatgtgctatttgaccttcagttatatctgtaatgtcttggaatactgtaacaaattcgggtgctctaccggaatcatcatcaggcttttgtcctggctcacgcctcagagactcttccaggttctgaatcttctctaatccttcagtacccttaggatgttgtgttctttcgatgagatcttcctttgttatacagactacagaagaagaagtgaatgcttctcctttcttgttgtatgctttgcatgtgtaaattccgctgtcccgttcgtacacatcaataaggtcaagcgttacaaaaccaaaatcgcttgtcagtttgaatctggatccttgttccaaagcttttccattgaagtaccattcaattgttaagtgaggatcattcttaggttctacttgaccttcaaagtgcagggcttgaccttcaacaatttgctgttctgaagttatttcgaccacccactctggtttcgggaagtctgcatcaggaagggatgattttctacccttggcagccctagcttcttcggcctgttcgacagcatctaagccagcttgtccttgagggtgctgtgtgtctaagtaaatattcttgtcacctgagcatcttagtgaaccagatgtggtagcagatcccttactattagttgccttgcatgtgtatattccggagtccttctcataagtgtgaaccatatccaaagaaacatagctaaaatcgtgcacgctcttgtatcttgaaccagaaggaagaggcttgttgttgtagaaccattcaactttcagtgttggatctctggatggctccacattgcattcaaagtggacattgtcaccttccttgcatacgatgttattgagatgtgaaataaatactggtacttcatatacgggttctggagtttcaggttttgtacccttaggttgttccaaagccccgattctatctaaagcttctgggtgtattgagtcaccaagcagccaatgacggtcttcaatcttgactgaagctgtggatactgcttctcccataagattagttgctttgcatgtgtaaatacctgagtcatcaatcctcaaaccattaatggataatgttaccaaaccaaaatcaaaggcactctttaatctagaaccagaggttagtgatattccgttcttgaaccactgaatcctaaggtttggatcggtcctgggttctacctgagcttctaaatagacatgttgtccttcaacaagcttgtcaaagctcttcaaatgagtagtaaagataggtgcttgttgcacggatgtgtctacaaacatctcggggactttgttcatagcagcttctttgagttgaatttgttcccatgactcaggcctcatggcttgatctacaattgtagatttagtcttaactttcagagcagtagttgaaactgtacttccagccctgtttatagctttgcatatgtaaactcctgcatcttgggctactaccgagtttatgtccaaagttacaaatccgaaatcgtgcgttgtgcggaatcttgaacccattttgagctccacgccgttaatgtaccattcaaagcgcatgctggggtctccaacaggcaccactctggcttcgtagtgagcatgttgcccttcccaaagttcagagggtccagtaagtacttgggtaaagattggcttctcaaattcacgttctggttgttcagcatgttcgcgctgaggttgctccaaccgctgtatctgtttcattccttcagggtgctgggtatctaattggatggccgcatttgtttttattttcattgctgctgtcgtgactgcttctcctaacaagttggaggcacggcacatgtagacaccctcgtcctcgtcacgaacatgagtgattgtcatcgaaacataaccgaagtcgtgagtctttgttattcttgagctgtcttcaatcaacttttcgtttctgaaccattctaccttaagagtgggatcaccaacaggaataaggcggcagtcgaaatgagcagtctggccttctttaatgttatcaatattttgcaaaggctgtgtaaagactggcctctgtcgtgtaaccggttctgggatttccggtcgtttgaatggttcgtgagactctaactctcgaattttgtccaatccttcaggacgttgagattccattataatactgccttttgcggttactgtcatggatatagcagaggtgcattgtccaagagcgttaatagctttgacggagtattcgcctgcatcctcagccacacagtgctggatatccaaagacacataaccaaaatcaaaagtgatatggaatcgcgaagcagattgcagggctttaccattgtggtagaattcaatgcgcaagttcgggtcatgcaccggttccacttgacattcgaagtgagccgtctggccctcgcacacatgggtagttcccctcagctccgttacaaatagtggtggagtgatggttggttcttcaatttccatccttgtgctgtgtccttgagcttcaagtttcctaatcttttcaaggccattaggatgctgagtatctaaaataatgcttctgtgccctgcaaccttcaacgtgcatgtgttaaccgcttcgcctagtttgtttgttgctttacacatgtaagttccggagtcttcagaatatgtgtacaggatgtctaatgcaacataaccaaagtcatgagttgttctatatctatgaccggccctgatcttctttccgttcaggaaccattcaacctttaggtctggatcgttaatgggttctactctgcactcaaagtgagccctgtcaccttccttgagattttcaagacttgtcagggcagttaagaataccggtcgctgaccaggcttctcttcttctactgttttcggtctttcatagctttccaactcttgaatcttctttaatctttgttcatccaatgtatccaagtagagaccagatttcgcatcaactttgacagaacttgtagttactgcttcaccgacagcattagtggctttgcacatgtaagtgccggtgtcttcagaatacgcgtacagtatgtccaaggctacgtatccaaagtcgtatgtggtcttaaatctatgaccttgttgaataggtgtaccgttgcagtaccactccacacgcatcgtagggtcattgaccggagtcagcgtggcctccaggtgcactaagtgtccctcagctacctgagcgttctttagaggctttccgaactgtggtttttccgcaataaagctttcatcgcgaacaatacgcctgttcctgctgtcatcttctaggtattgaattttttccagtgcgctttcatgctgcgtgtcccgtatgatagactccttagattgaacgttcaacttgatcgacgatgtggcctgccccaagttgttgattactttgcaggtgtactcgccagagtcctcgccgtatacagtgaggatatcaagagctgcaaatccgaagtcgtaggcagttctgtatcggtgcccactttgcagtacctttccgttgaagtaccactctaccctcatgttcgggtctgggtatggctcaatgcggcactcgtagtgagcgctctggccttcgatcagcttggaaggtccgtttagttgtgtgatgaatcgaggtggcatgttgatgatgtccatgtctacctcctcccgtcgagtgtatctcgacgtgtcctccagttgctgaatcttctccaatgcactctcgtgctgtgactcgaattgtaaagatgctttagactgtacgaataatgtagaagatgttacagcttctccaagttcgttaattgcgcggcatgtgtatgtaccagaatcttctgggtttacatacttcatattcaatgctacgtatccaaaatcgtgcatagttgtcagacgatttgaagcttcaattggaactccgttacgtagccactcgactcgtagtcttgtgtctcctacaggaataagcctagcttcaaagtgggcagcttggttctcggctactctgatgtccttcataggcatcgtgaaaactggcgcttgtgtaatagactcaggttcttgagctgaagacaaaggtcttgaatatcttgaagtatcttccagttggttcaatcttggcaacgctccttcgtgttgagactccatataaatggattttttggaatgtacgatagcgattccggacgtaactgcttctcccaaagcattgattgctctgcatgtataggtacctgagtcctctggcaaacatgacataatgtctaaagcaacaaatccaaagttatttgtttctgtgaatctcgatccgctctttaaaggtttgttattatgataccattctactttcatggtgggatcagatactggaatcaatctgcactcaaagtgagcgcgttgcccttccttaatttcaatgttctttagtgaagttgtaaatattggtgcttgcgttgtcatctcatcaatgacatcagtacggtggtaccgggatctgtcctccaggtgctggatttgttctaacccagcctcattttgtgtacctcttacaatatcagcagtgcctcggcaagacaggcggcagcttacttcatctgtacccatcatattaacggctctgcaagtgtaaataccggaatcctccgcgattaggtcgattatgtcaagagccacgtagccaaagtcatgaatcggcctaaatctatgtccaatagtgacaggctgaccatttttaaaccattcaaccttcaggttcgggtcagtgactggttcaagcttgcattcaaagtgtacgtggttgccttccactacattgtcaatcgactttggttttgtcacgaagtgtggcttaatgttaactgattcgtcaatcacttctgatttcttgtaacgggatgcatcttccagatactgaatcttttctaatccagttgggtgctgtgattcaaatatcaaatcctttttagcaataactcgtaaagcacaagatgttactgcttcaccaagctggtttgtagcttgacatgtgtaaacacctgagtcttctggatacacactcaaaaggtcgagcgccacgtagtcaaattcgtatgctggcctaaacctgtgcccagttttaattggccgaccgttgcagaaccagtcgactctcatggttgggtccccaactggctgaagacggcattccaaatgtacattagtaccttcaacagtttcaatattatgcagggctcttgaaaattgtggcgcctgcatgacggttatatcttcctgtacttgtctgctacgtcttgcagcatcttcaagcatttgtatttgctcaacagattgttcgttttgtgtttctgtcaatatatcagatctttcgattactcgtaccattgcagaggtgtgtgctgaacccaaatggttaacagcacggacagtgtattctcctgaatcagtggatgttgcatgaatgatatctaatgcaacaaatccaaagtcgtagtatgttctgaaacgtgatcctacggtaacggatcttccattatggaaccattcaaccctcattgtagggtcacccattggctctaatctgcactcaagatgaatatttttaccctctgagacgggctgaggatctgataaaggctgtacaaagactggctttgatttcgatatctcttcaatttgatacatgggttccacgaatttagactcctccatttgcctggtcttttcataaagtcctcgatgaatactggaagtgtcaatgctggaacgagtctcaacaatcattgaagcggataactgtgcttctccggctgcgtttcttgcaactactgtgtatgtccctgcgtcttcggcgcgtacgcttgaaatatctagtgcgacataaccaaagtcatggtatgtctgtattctattggcagtagtaatctgtctaccattgaagtaccactctactgtcattgtgagatcactttgtggttctactcgcgcttcaaaatgtgcgctttgtccttctacaattttgtttgttcccttgagtgggcccaaaaatcgtggcttttgtgttactcttacttcttcatcagtcctcttggagtacttactagcatcttcaagatgttgtatcttttcataaccacctggatgttgtgattctgcaattatgtctttcttggtaacaatagttaaatgagcactagttgttgcctggcctaaggaattgtatgcacgacacgtgtaatgaccagcatcgtgtatggttacagacttaattgtcaatgctacatatccaaagttgaagaatgttgtgattctggaacttgcctcaactgggcgaccgtcttttaaccattcgaccctcagagtagagtctcctactggttcaagacgggcttcaaagtgtgcaaaacctccttctttaatgttaatttgatccttgatgggagttttgaattcaggtctttgtgtgctctcaggcatttcctgataatacttttggtgctgttgttgctgataagcttctaactgttcagtcttttcaatgtatcgtcgctgttcaggtattccgagatctccggtaactgtgcttctagccgctaccttgatgttggcagtactaacagcttcaccagccttgttcacagctctcactgtgtacgaacctgcatcttcagcccgtaggtgcatgatgttaagggagacgtaaccgaagttgaagattgacgtgattcgcgagctcgctgtgatcggcctgccgtccttgtaccattctactctcattgtagggtcactgacgggagtgatttgtgcttctaaatgcgcattcctaccttcttggaattcaccaagatcatgtagtggccttataaactgaggcctctgcaaactaagttcctcgactgactcttggtgttgatacctcgagtagtcttctaactgttggatgtactgcaaactttcaggatgttggctagttctttcaataaccgctcttggtgtgacttgtagcacagctttagtctcagcggcaccggtagcgctaattgctctgcaagtgtattcaccactgtcttgcaagttgatgctgagcatatctaatgaaatgtatccaaatcggaatattgatgtaaaccttgaacttgcttcgatgcttcttccgttcctcaaccattctaccttcatagttgggtcgccaacaggctctatcctggtttcaaagtgtactttaccaccttccatttgcgttatgctctgaaggggcacaataaactgtggcggaggataaacccggtcttcctcaccctgaggaatgtaaggtcgtgccctttctacgtgccttaagtaaatcacttctggaccaggcgctggctctggttcgataattctggttgggcgcggtagatgcagacgcttctgctctggaggcggctctttcggtacttccacgtagagccgcgcccgagtagcggtggaacctgcgacgttctgggctgtgcactgataccatgccgcatccgacgccttggctcgcggaatatccagcgacgaggctccaccctcgatgttgattcgtaattctggattgggtataacttggacaccgtccttctgccatgtaatccttggtatgggagtgccaatagcacgagcattaagcgaaactggttctccttcgcgtacacttaatgtgctgaagcgttcgatgaattttggagcaaccacttgttccttttccaaaacattcaaccgacactggaacgatgcttcgcctgacttgtttcgtgctatacaagtcaccataccactatcacttcgttgtacgtttgtaatcataagagcgtgatttcctgactcattgactaagatcttatgattataatcgtctataatttgtttatcgttaatgaaccacgtaacttctgggtaaggtctgcctgtgacgcggcaatcgaatcgcgtcatcttaccttccgtgatgtcacggtcttggcagacctttacgaattgcggagcgagagctttttcatttacttctactctttcttcagtctgtaattgttgagtatccattaaatactgagatttgtgatcctgcacatatgtttcttgaggagattctacagcaagatatgccgatgtaacaatgcatccattaggattttcagccaataatgtgtagtggccaccatcacttttctgtgtattattcactctaagtgtagtttgattatgagtagttacaatttcgtgtttgttcgagttgactattctttgtccatttctaaaccacgtgacacgaggcttgggattaccagacagttggacctggaattgggcatcagcaccttcctgcaatttggagttgcgtggtttctgcgctaccttcggcggcgcaactgggcccaatgttcggtcgatttctgttgagatctggacgtcagtttctccaatgtaccttcgtgttattgtttccctgtaagatacttcccttaataatctgtattcaaacgtgtccaccttaaaatcttcaatggagtctgctccattagtgtaggaagtcttctgttgggactggcgactttgctcggaagagtatccttgttgcgtggcatacgctttgtgttggacagtctcgctgtggtggctgtagctgctctgcgcgtgcgactgctgcgccggcagcgccacgccctccggctggatgtagacggagcagatcgcctctccgtactggttgcgggccgtgcaggtgtactcgccctcgtcgccgggcccgatctgcttgatcagcagggacacgtcccctgtctgctcattgtaactcatactatacttattgcattctactaagggggccttcttcctcgtccacgatacgacaggagtggggttccctctaagttttccttcgaatttagcattgcctccttgtgcgaatcttgcattcttgaatatctgttcgaaaatgggcggtgaagggtcgccagccctacctgaagtgatcggtaagtgctcccctgatctctcaacccgctgctgcgtcaccagctggcgcgtgaagtgctgctccgtgcgctgctgcgtgcgctgctcgcgctgctccacgcgctgctccacgcgctgctccgaccagcgcgactgcttctccatcgccgcccgctgctcctccagcacgaacacaaaaaaactctcactcgacgctgcaagtcctctatctcaacagaggtcgtttcggcgcgctcccaaaattaaataataacgccacttcgaaattcttatactagtccacgggttcatttagcagaagtcaagtcattataacccaagtccagcaaccaagacgtcggtcgattgcgaatag

SEQ ID NO: 627 - DNA, 2105 bp, Plutella xylostella
gtcaattatatagataattttattaacaataaaagtaaaatgagtaacgacttatcatgtaggagtgggcgtgtatattacagctagtagtcggcgtggcttacaccactgagtcttttctgttccagatgtagtggtggtcggtgtgcggcgcgcgcatgacgccgacgccgccgccgagccgccggtagttcatggcgccgcacaagcgccactggttcgattccccgtcgaacacctctatagacttaaggtacgccgtgccgtcgaagcctccgacggcgtagagttgcccgttgacgacggcgagccccacgcccgagcgtcgtgacgtcatcgccactacgggcgaccacgcgtccgtcgcggggtcgtatctttcagctgaagatagttctgtgcagtcgtcgcggccgcccaccgcgtatatttgtccgtcgaataccgccgtgcctagatgcttccttctcgtgctcatgggcgcgacgggcgtccacttgttggcgcgcgggtcgtagcgctccacggtgttgagcggcgcctgcccgtccgagccgcccaccgcgtacagctgcccgcccagcaccgccaccgccacgcccaggcgacgcgtcgtcatgggtgctaccttggtccagcggttctccttgggctcgtatctctcgacgtggttgaggcactgcacgccgtcctgcccgcccacggcgtacagcgcgccctccagcacggccacgcccaccgacgtgcggcaggaagaggtgggcgccactgcgccgcaccactgattagtctgcggatcatatctctcaatgctattcagatagctctgtccatcatgcccccccacagcatacaacagttcatgtagaacagccacgccaactccacatcttctcttggacatcggggccaccattttccactcccctgactgtgggtcgaatcgttcgacggaagcgatggcgtcgccgctgcaccacccgcctaccgcgaatagcacctcgcctcttctgagcggtttcctcggccgtgtcctcggcccctgcatgagcggcctctcctgcggcagcagcaggtagttcttggcctcgtccagcaggtctcgacatgcgtcgtcggagcgcaccagcagctccgaggacaccgtgcccaccaggaacttggggctgagcaaaggtaggcgcacgtgttggaggacctgcgcgaggtgcggtcgccgttcagccacgttgtacttgacccaggacatgacggcctggaaggtctgctcctcgctgcgcacgttcagctcgtccgacgacacgatgtcgatgagctgcgccgccgggagcagcaggaactcctcgctctccatcacctcaggaaagttctgatgcgtgaacttgtcagctatccgcagcaggtcgcggcatgagtgcgtgtcggcgaaggcgcggatgccgaggcagtttgagcagtccagctgccgcttcaggaactcgcagcacacctcttggatctcttggagttggagtaggcacgctgctgggagtagcgcctgcacgttgctctcctcgaccacgatgtgcgccgtgtagcagaagtcgacgagctggtccatggccgtgtcgtccacgtcgcggatggtgacctccgtggcgcgcgactccgccagctcgcccgtgaacatggcgcggaagtacgggctgcatgctgacaggatcactctgtgtgcaaagagcttcctgttggccacattgagcaccacatcacagagctcgcggtgccgccgcaacgccgacagctcgccgaggatggcacgcgggtgcttctccgacgtgtgcgacagccgcgcgcccccgcccggcgacccgccctcgcccatcctcttgtgtccgcgcgaggttcccagctgcaggcgcagcgggggcgaagcccagccccacacggagtcaatctttgacgattaaagggacactgcacacttaaaactgcccgttatggagcttattgtgaacacaatactctaaagttaaaggcactatttctatttggaaggcattgattatcaatcaggtgtttttgtgtttattctacgagcatcataccgatttgtccactattca

SEQ ID NO: 628 - DNA, 487 bp, Plutella xylostella
ggcgcggtagaaaggagcagcggagtatgcgtagtaaggcgcagcagcgtaggggaacgctccagagtaggcataggggtacgctccagagtaggcgtaggggtacgctccggagtaggcgtacgggaagccggcggggtaagagtagggcgcggcggggtaagcgtaggcggcgggcgcggcggcgacgacggccgggtccttcctcacgacggcgttgaagccctcagcgccggccgcgtagtccacggtgcgccgggagccgtcggcctccagcagcgagtactggccggtcacctggtccccggcgcggctctccacctggctcttgaagtccccggtgagcgggtccgccacgccgtacgagaagctgctcgcgtcgcccgccgccgccgccgccaccagcgccaggaatactgccagcttagcaaccattttggagaataggtatgttgtggtgtagttgtgactacgtttgtgaatcccg

SEQ ID NO: 629 - DNA, 2201 bp, Plutella xylostella; identical to SEQ ID NO: 351

SEQ ID NO: 630 - DNA, 941 bp, Plutella xylostella
ccctctccctcgacgctctgcagctcgcgccactcctcgatggtctgcgccaggtccacttgacacaaggggaccttcacctcaccgatctggtcgtgcttcgagaaccgatcgaaatcgaagatcgcaaacactagcgtcttgttcatcgcatccgcatacggcacgttcttgaacacgaaggtttcgttgaataccggactgagggtcttccggtggaccttggtctcgaacttcttcttcttgtcgggcagcaggtagaccttcacgtaggggtcggaggtgccgcccatgtccagcgccggcagctcctcggcctggatcaccgtcaccgacaggctgttgctgttgaaatcgtactccagcttatattgcagtttgccaagtttctgttcctccttcttggcatcgccatcatcaggttcttcggcgttctccgtcagctcgtccatgtcaggctggaccttttccttgtaagcggagccgaggagctggaccgacttgaggtcgacgccgcccttgcccttcttgccgtccttggagcggcgcttgcggaagcagcggcggatgcagcagaagcacacgcccagcaccaccaccgccacaccggccagtatggcgacgagctgccaggtctccatgtgcatcttgtgcgccagctcggccgccttctcgccgatggactccgtgggcaccggcgccatcgtcgaccctgcctccgtcgggctggtggcgttgcccccggcggtggcggtgatgttgctgagcttctccatcgtcttctcggtggcggcctccacggcttcgcgccgccaccgcatcagcgactgcagtataggagacatgtttagaacaaatgtaacttgtttattagtttttgtgtatttgattacattaattttgaaagcatgcaccagatattcttactgcatattattatg

SEQ ID NO: 631 - DNA, 7738 bp, Plutella xylostella
cttgtgtcgtttgtgtgacatgagtttataacataaacaaggtaattataacggagatcacaagactttaggtaacaaacaagcaacattgtgttaactgagtattataagttaaacatagcacacactcactggttttgtgattataacaaaatgataaacaatcaaatgacggtcgttcgtaatatattttatatgtacgtcttattatgataagaagagtggaatttacaaccatcgttttctcaactcttcacacattcaaagaataaaaaagtcaaaaacaataactaatctttcaaagaagttagactttcgtaaaaaatcaaaatagtaaaaacaacttatcctaataaatggacaactgtagaatgtagaagtcattgactctcttacagcctaactaagaacacagtaaagaataaataacaattgttttcttataactatcacataaagggcacttgctcagcaatggccgaagtttcatcgagattgtataatactcagggatacaaatataagttttagacttatcaatcaacaattagcacttctgttctatttacaacattttagaaagtttcttaaactgcctttacttcagaactaatttctgacaacttgtctgcagtcttttcatccactttagtttcaccttcttctgatttcttgctgtcagtaacagctacagaatctcctacgggtgatttttcagcttcactggtgtacccagtatcagggttgatggactcttttgattcatctttttcgggagtttttatagtatcgtttgaactctccaaagtcgtgtctggtgaaatatctttttctgtcgagactattttatcagattcacttttgaatccttcatcaacctctttatcatcttctaaagcgtcaacgttggcttcaaacgatttgttttctatcactgtgtggttactgctgatactttcatttaggtcaatgggtgttgtgtctaaatcatcgactatggtcttttcaggttcatctgatttagattcttctggcgtatcggccttttccgtggcttcaatcgattcagtaggaactgcagtaggttctacattatttacgtcaactggtacggatgcagattgttcagtttcagtctctggtttcgttacttccgatggtgcggcaatttccgtagcctcagtcgtttcaatttgtgctgaatcggattctacctctacaggatctacattattactactatcttctcctactttttggacgatttcattaactatttctgaggacacttcattagcacttacttcgggtgcttctgatttctccgactttccaacattaaccattttgccgacatcttcaccgcccagtaataatcttacaagtactggttctttcgtcgtgtccaacaactctatttggaatgtataatcttcggccgttaattcgtcaaactttttcttcatgttttcatttgtcgtggctccttcgggaagtgctaggcggcaacaattggctaggggttctattagagctagatcttcaggtaactgcctgaagtcttcacacttggctttgttgccgtagtctacaaacagcacctgtgatccgacgtcgcaaaactccagtatcttggctcggtaccactgctcgtcctctgcccagaaggcggcgcagagtgaccctactttgagttccggcgcggtgtcgaactcgggcgcgtcgatcattctctcgagcaccttgtccaggtctggagtggaggactcgaggtggatgtagaagtcttctgtggagttgacgtggcagaccttaccggtggattgcagctcgagacccaccggcgcggggcgctcggccggtgcctccgccgccggtgcctcctcgaccggtgcctccacgactggtgcctccgcggccggcgcctcctcgcacagacccaccagctcctccgtcacagacttgccctccaagaacaactccactatcgaaatatctcccgacgcgatgaattgaactgtgaatatcgtcgcgccctccgccgccaactcattgaatttaacttctgatttccgcgaccaggatttgatatcacgaggcttctgcagagcgcactttcttgataacgccggcttttgcttaagctcatcgggcagattacgtagttcagtagctatggacgcgttaccgtaatccataaacagcacctctgtgccttccgagccgtccactataacctgagctctgtaccacgcgccgtcttcagggtacttggcagcgcatataacgccttcctccttgtcagtgagctctgggaagttatcggcgtcctccatgagagcctccatggcttgcaactcagctgtggccgcctccagttgaacccagaactcagatggcgaattcacgtgactagcgaagcacgtgggcaagtctccacacgccggttcctcggccctattcgcgtgcccttccgcaactaatttatccgtcaagttctgtccgtttacgaatatgtccacataggttgtgacatctttgaggacgatcagagcgtcgactggggatgacagatctccgactagttgcatgaagtaatccgaagcggtatcggaccactggccagtgccggtagggacggcattcacactcgacttgaccgcgtaccgctcggcttccttcagattatccggcatcaccttgatcaaccccggctggttgtccaacacatctgtgttgccgtagtctatgaaccgtactgtggttatgtccgagtccgcgtcaagtatctctgctctgtaccactggtcgtcagccaagtatttagcgatacacagcgtgccaagctctctgttttcaacgtccgcaaacgttgctgctttctcctgcagctccgcttgtatttcctcaatagcgtctattttgtcggacatctgtagccagaactgtccaggagtatcaatatggctgatatacactgaggtacagccagacggcagtgaaaccggttcttcagccgccggtgccggtgtagcttcctctgcttgcgtttgcggggcggctagcttctcattcacgagcttcatagacagatccactccatccgagtgcagactggccagccagccgtctgttccaaacgacactgtcacttgcagctccttctcttccgtccattccttaagcttagccactgcatcatcactcagaggcgctaaccctagcccgacgactaacgctagcgcgcaaggctcatagaatttagtgttgagtttcttgagggcatctctaggtagtgtctcgcagttgccgtagtcagtgaactgcacgttgcactcggcgtccgatgacgtcacgatggtggctcggtaccagttgccgtcgctcgacttggctgcgcacagaccttccacttcgaagctctccaggggttctggtgttccttcctcataaaacttgtacaactcatccaacagctcagctatcctgtcgccatcggcggccttctgaagatacacttcgtccaacgacgcgacatgcgatatgtacgccagcccgaagttatagttgaacactgctcgcgcgcacagcggagtgacagattcatatgcgccctcgtccggcgtgaaaatggccactttcgagccggtttctgggtcgtacagggtggtgtgcaggctgatattcggcacgtcattgatgtaaacgatgaactttttgtccgtcaatctttctttcagctcgtcgagagaaagcaacttggtagattcctccgtgtaattgtggaggcagcattccagcgattggtagtagtacacgcttagctccgtcggcaagatcattagattatccatagtagtagtgacattaattccataatcaggcagcacggccttgatggcagtcttgtccgaggtgtcagtgagtatggcgcggtgcgtgcgaccgtctcgcttcaccgtgcagtggacgccgtcggttaggcttgattccgctaggggggttaacaaagtagcgtcaaagttatctatagccttctcgacgagcgccgccttctccaggtccagctgaatgaagaacttgtcgaacgactccacgtgcgtcacgcggcacagcgcttgttggcccacgatgatgctcaggtctatggcttcgtctttaactgtaacagcggatccgaggtccgaagcagcagctaactccttctcaatcaacatatccgcgacgctcgcgccattgttccataacgacaccttatatttcccttcttcagtagcctcttggaacacgcattggtaccgcggcgcgttgaaacacaagtctatgtcattattcgccttccattctccgtctttaggcgccacgcctaacaaagaacagtgaaccgccatcttagggacttctaacagttgttcgtccaactgccagatgtcgcgcgcgtcgaccacgaatttgttcccaaagtctatgtactgtactatgtatttgccgaaaggttgagtcgatatcactgtggctcggtacaggacgccgtcttccgggtatttggctaacacggacgcgccgacagatatatctccggagtaggacctcactcccttgtatatttctggtattttgtgcatcatgtcgaggaatttcgtctgcagcgacaggatctgcgtgtagaagctatccggggagattatccaggttacagacacctcgtgctgtgcgttggcttcgatagtttgttccgggaatggcttattaagagggacaggagaggggaggtctttggggacgttgcggggtttgtagggccccctcggcttgtcagtgcggaagctgcggtcagacttatgctcatccgatccgaaggaccgatctgcgcggtctctaggagtgaagttgctctttggcctgtctccgcggtctcctctctctccccggtctcggttgaagtctctcttctgatggaagttctctttcttgtctccccagttgtctcgtctgtctcctccatactcccgccgcgggggacgctccgggcggctgttggactcccagttgtcattcttcttttcttcccactcgtcttgtttattaaacttgttgtcgttgtctctaaagtccctcccgtgtctggcgggcggggcgctctcctcccacgtgtcttcagaggcggtcacaggcccgctgctctggttctcccatggcttggagccgccgcgcctgtctcccttgtcgggcctgcctgcgaacttctcgctgtgtcggccgggcccggagcggtcgaacccatcgcggttgtctctagctctaaagctgcctcctctctgcgccaggtcatccccctcgcgtggtctcctatcatccttgaagctcttctccctacggaaccccttcttgcggtcgtcggcgctctcgggggagctgaagcctggctctggagcgtctttgcggaccggcgttgtggctttcggctcatggctcctcggtgtggacagctgcatcatacgacgcgccacgtccagcggcggggagcaggaatcatccacgagcgacaccagcatcgtgtctgacgacgtggagcccatcacgtgcgccatgagagtcttctccagggctagcatctcgagttggttggacgacttggtctctatcggcttgtcttcgtaacccttcaaagcgcacttcaaggcttgcgccggcagctgtatcagctcgggcgtgatggtcctcaggtccgacacgctgatctcctgttcattgccgtagtccacatacgccaccgtgaccttcccgccctgctggttgagcacgcgcgcgcggtaccagttgccgtcgtctgggaacttggcgcaacaagcggcacctaatggtaatgcaccaggggacgatgaccgctcgcagtgcgccttcaccgcatccatcacgcggttcaactcttcaatctggtcggatagttggacgtaaaacttgtggcaactgtccacgtatgagactaggatcttgctgccgcgagtcaacatgtccatccatttgaattgtaaggtctctttgatggtggatgttagaaggtcagagacgttcttgttgtctaggtacaattctccgtattggattagaggaggcccttcaggcgcgactacgcgcagtgtcaatacttttccgttcactagctgcttgaatgactcattcaggtggggaccttttttgaaattcttcactccagacaagcagaatctcatagcaaacacgttaggcttcacaaactcttccggtatatcaaatatgtcatagtaggacaccatttctgtgtccccaaagtcaacaaagaatagtttacactgttgtccagagagattcataactatggctcggcatatgatgcggtcaccggacatgcggccgaggcagactgtgcctatcatggggggctctgtcaagctgcggtgaggctgcctgttgatctcatccatcatatcttcgagcctcttagcatcagtcacaagttggacggcaaacagttccgggccttcttcacagtatgacacaaacactttgtgttgtgagtttatttccagtagtctactcttgtaggttttgcttgatttttgaggagacacaggtttgcctggtggtggagtgttgagagctggtgacactggagtagcccctccagatggtggaggctgctgaggctggcggataggagccctcagtgtgactgggtttctagatgtcttattgaccatcagcctttggctaatagctgagggagctggcacatagcctccattgaaaggaacagacacattctgctgcaacctcatagctgatgctgggttagacgggaatatctgatttgtaaagaaaggcacatgttcagtgaagttgtttggctcaggcgagtagctcggctgccaggtggaagacatgggttgcatgctctcattattcagctgtagtaagagcacctcctgcttggtgacgggtaccgcaatgccgtacttattgttcacgaggtgctgggacaggtcgttgccctggaacaggatggacacgatggggatggtgcgggtctgcgcctccacgttgacggggtactcggagtagcagagcagcgcctgcagcttgagcagcagcggctcgtcccagcgcgccgccgggtgcatcacgcgcgccacgtagtagtcgctggcctgcccgcgcaactgcagcagcagcgggtcgtaggagtccaggaaccggatggtgctcagcgagattatgtccttgttgccgtagtcgatgaagtgcacgcccaccagcccgttcgataaagttgttgtgctcacgatcttcgcgcgatagtacgtcccatctttgtatttggcggcacaaatgatgccctcgtgaatagccgccggcggcaccgctccgatgcccttctcgaagttctctcgtgacgagtctatcaggctctcgatcatcagcgccgcctgcttgtccagctgcccgcatattttcaaaaagggaccgtcgctgtccacatgggtcacgaagagacgaaaggctctttgtccatcattaggcaaagccatagctggtgttttaaaagtatcaagaatatgaaaaataggcactgactcacataactccagttgcaaactacaagtaatcgtcgtacttttacagaactaacgtaaaaaaactcatctaccgctttcttttccgtttacgttttcaacaaacatggcgcacgcaatttttt

SEQ ID NO: 632 - DNA, 423 bp, Plutella xylostella
ccccgaccaatcaacagctagcaattgaccgagtgcactgtatctgccactctactcggtaggtgtaatcagggtattactctaacttaatttacttcgatatggaggtcttaggttggaacccgttgggtccggcggtgaacgtgacggtgtagtgtttgccgtcgggagccacgtaggagtactgccccgtcacggtcagggctgcgtcttccgactgagggttgtcgatcttgccctcctcttgtctcgaggtgccgtcgctggtctcgtaagcgaagctgtatccgtcgggctgcacgtcgctgtcgaagcgcaggatctgcacgtcctgcccgccctgcggcgcgcccgccgccgccgccgccaggacgcacactagggccacgtatttaaacattttgttgggtaccgtcgtgagca

SEQ ID NO: 633 - DNA, 1527 bp, Plutella xylostella
cccacttgtcggacctgcggctggtgtcccgcagcgcggaggcggtctcggcggcgaggtccagcacgccgatgacgggcttggtgacggtgcccaccagccccttgcccacgcccgccagaaaacccggcagcccctccgccgccgcgccctcgtagctgtgcttcaccagcgacgtcatgccgcccagcaggccgagccccaggccgcgcaggccggcggccaggtgcgagcctgcccccgcgctgcggatgcgccgccgcgtctcctcgtgcgcctcgtccactatcacgcgctccaacccgtcgcctagagactcagtaaccttagcagcagagttcgagatcccatgagtaacattcttcaacagcgcgcccacgctgccctcgtagatgagcccggacacgccctccgacacgtccgccacgaaccccagcgggttgcccaggaagtccaccgaccccaggatcttggctgcttgccattttagctcatccttgaaatgcttcaatatcatatcggcgaggtactgcggcgtctcgaaggcgtgtcttcgctggaagggctccagctcgaccgccgcgtcctcgaacttgatgagcgtgaggccgagccgccgcttcaccgccgccagctcgccctccagcttgttggccgtgcacatggacagccggacctggctgggcatgaggcgcagcgcggcgatgtagcagcgcggcgcgtggacggcgcacagctgctgcagcgcgcgctgcgtctcgtagtcggtctcgtccacgtgctcggtggcggccgcgtcgtcgccccacgccgcccacacgcacagcttcaggatcagtctctcctccaaccgtatagcgatgggtgcgagcgagacgacgagatggtcgaagaacagcgcgttgtacttgccgggtggcgccagcgccaggtcagccgccgcgtgcagcgccgcgccccccgcaccccccggagtacccggcgcggggggagggttgaggcagtatagcagcacgggggacggcgttccgagcagctgattatccagctgcacatcttccacggccagcgcgaccctcacatggtcggccacagccaggtcgacccggaccccggccagctccgcgcgcaccagctcggcgggcggcgcgctggcaaggagagacaccgccacgcccgccaaagacacgcgtgcgccccactcgcgccgtgggggtagcgggggcacgggggagccttcgagccagcctgactccggttccttagagtccacaatcttcaacaccgtagtgggtccatcagcatagaccctcacatccagatggccggagccggggcgcagcgtctgccactgcacggcctgctccgccggcggctgccccgaccggtctgacgctgctagggctaggactgcgcgggcgcctggcgtattagcggcagtaacagcgagcgtgtcgtgcgcgcaggtcatgcggccgcgcagcaggcgccaggcctgcgtggaggcgcggcgcggggaggggcggc

SEQ ID NO: 634 - DNA, 1123 bp, Plutella xylostella
ggccgcttggcacatcctcgccagtagaccagcgagctgcaggggactccccagcccgtcggcggcgcgcatgtgcgtgaccccgagcgcgcggatgaaggcgaggcgcagcggctccggcgcctccagcgtcttgcacacgcggaacatgttgctcaggatgtcttctgctgcgtagccttgcttgcagagtttggctattatcttataagcctcatgtatgtcctgtcgcgtgcaggcctcgagcatggcgcgcaccatgatggggtgcggctcgtcgcacaccttgaacacgttgtcgggggacacgtggcccgagccctgcgccgtcgcctgcaagttgttgagagcggagcggaggtcgccctgcgcggtgaacacgatcgcgcttgctccttcctcggtgtaggagaggttctctttttggcatacttctaggaccttagcaagtatctgagcatcagacagccggccatatctcaggacagcacagcgggactgtatgggctcgatgatcttctcgctgttgttggcagcgagcgcgaacctggtggtgctggagtacagctccatggtgcggcggagcgcctgctgcgcgccctccgtcatgctgtccgcctcgtccaggatcactatcttgtggcgaccgggcgggagggtcaccttctgttgcgcgaacatcttgatcttgttacgcacgacgtcgataccgcggtcgttggaggcgttgagttcgagcacagcgtcgcggaacgaggccccaagcagcgcgcgcgccaggcacaggatcgtggtggtcttgcccacgcccggcgggcccgcgatgatcacgttgggcgcgttgcccgacttggcgaacaccgccagccgcgacaccgtgtcctcgttgcccacgatgtcgctgaacgtctgcggccggtacttctcgatccatggcaggtggactgtggattttgtgctcgtagttggttttagtggcttcggggcaggggtttcgtcgtccacctccattatggttacatcgtcgtcactcattttggaatatgaacaaggaaattatcaagaaataaaaagaaaagaaacaataaatccggtgaacttaacataaaaacgcgcgctattt

SEQ ID NO: 635 - DNA, 2584 bp, Plutella xylostella
cattagaacatttttctacttaccaactgctcactcacctcacactggccccaaaatcttatatacctatctgtcataatttgtttgaattggggccagcgcacgggtttaattttctttaggcaatttttatgacaggcgcattctttattttgaaaacagtggttacgagtgtaagatacagacagcccaatagctaatttatccttcttccttatacaatagcgaattgatcgtagagtagttctcgcaccttgtagtactcgtcggacagcactccctccagcgccacgcgcccgttgtccaaccgtctaatagcaatagttccgttgcagcacgacagttctccgttgttgaactcggcccgtatgttgtgtttggccaacacttgccgtaagttggacaatttgagcgagttgatgaatgacgccgcatgttcggagttgggagccggttcgagcgatgggattaggtctagtggctcgtcttgctggtcgtggtgtcgctcgcggctgtgcctcggcggcgccacgacggcggagagccacgccagcgagatgtccccggcggagcgccactccagccccgacaccagtgcgtccgacagacgcacctggtaaatatgtgactcggtggtagcgtctatggtctcgcctcggctgggagtatacactttctctatgccctccgcctcacagtgttgtctgagcactttgagtgcgtcagggccggccctcagagccaccaacgcacgcggcttcacttgcgacacgatcctcagcagggactctccgtcgcagcggccctcaagttctatgtattgaattcgagcttgtatgtgcacttgtgtagtgtaggagatgcatttgcgagggatttcgggcagctcctcttcaatctccattttctgcggcgcggcgggcgacacgtccttcacgtctccctccgtgtctatgatctccgctaacctgtagtcttccggcttgataatctctccgtagtcgtcgtatcttgtccgctcgtcgtgacacggatacatggcgtggtgacgcttgttggacttgaacctggacgcggtccgatgatcgctgcgaactggaatatcgtgtcttcccgtcaccaccatcatctccagagagtcatcggagtcagagtcagacgatatgccggccgggtcttctttgacagtattattaagattagtcttctgctccagcaggaactggtccagctcggccccctcgagtcggacccgcttcttcaccgtcagctcgatggtgcggtccccgccgcgttcgatgaggtctcgagcgagcgtgcctggggaggttctagcggtcaacacaatagagtttacagcgtgcggggcccactgcaggaacaggtctcttgcaaagccacactctaggtctgggaacgacgccagcaccaccttgggtccaggtgtccggtgcacctcggccgccgagtgacacagctgcacgtggcgcagcgcgaacgggttgctgcgggcgccttcgaacgcacgggtcatcttgttggacatccattctatctgtgatttagcgaactccagcacattataagttacgttagacagcagcagcagcgaatacgccgtcagccccgagtcgcggttcctccacagctggtccaacatgtgggccaactctagcactcggccggccgtgtctgtgcagacaaggacgcagccgccgccgcggagcccgctgaggattgtggtcatcagcttctcatccctcaacctccgtctctgctgcacatggttggcgttcatagccccgaccaacatgagcgacggtctcaacaaccgctctacctcacagccgttgagatgacgctccttcttgtggttgaagtctggtgcgtacacaatgtcctcttcaccgggggcagatattctccagactgtgcctccgagggtgtggccggccggcagggggacgatgcggatgcctagacctttacctttcatatcaatagtttggttgtacttcaactgaacaatgcggtcaaaggcattgtcaacatcatccagtgtgaacaaatcaaactccgacacattcctgtgtgcctggtacaagtcatacatgaacatctgacccattttgtaaaccgggagagtggcgtacactgggcagttcaaaccaagctttcctattgcatatggtaaagccccaagatgcatgggatctgaatgggatagaagcactgcatctatactgttaatgtgtcttttcaagtccttgataaagtcaatatcgaacttctcatcccatccacagtccagaaggatcttaaactcgtctatttgaagtacatagcacgggggagactcatcaataacaccagagaggcaggtcaacttgataatcgaagtcatttctgccggaacctgattttatttcgagaataagtagataaactataaggctttacacataatgctcagaagtgtaaataaatgattagatttcagtttctccctaatactgaaataagaaaataaactaaacgcgcgagcgcgaaacaaaataattctgttgccgttgttaaataaaat

SEQ ID NO: 636 - DNA, 2927 bp, Plutella xylostella
agcttcatcgctgacgcacgtatgatactaactaactagatactttgaataaatttgtgttggggaatttaagatgattggaataaaagtgaggtgttacaaagacatcacccggtttaaaatacatgcgaggaatcctgtatctgtgagatggaatagcacaaacagtccggcattgaagacgctagaggaaatgcctgggttgtctaaattgccggttataggggctctacatcattttttaccggtagttgggtctattggacacatagaaaatttcttcaacctatacggacattttcacaaaaaatacggcagctttgtaaaaatggaaggaattttatcgcgaccacccatggttattatgtttgagcctgagcattatgatcaagtataccgagtagaagaagaaaatcccttgaggccaggatttgacactattgtctattacagagaagtgcttcagaaatccacgtttgacggggtttacggtttgaccactgcacaaggtgaaaagtggcgagattttcggaccaaagtgaatccagcgttactgaaattaaaactgttaaaggtatatgcaccggggatcgaagagattgctacagagtttgttgaaagactaaagaaaacaaaagaagatccagtgtacctacaacaccacttctacgatgaaatgtccaaatacgccttagaagctgtgggattcgtaggtctcggcgcaaggctgggcaccttgagcgaagacctgacagaggaccacccagccaggcgcctgcagacgagtgttaaagacatcttcgacttggctatacgcattgaagctcggcccaagttcatgaaacatctgcccactgcgccttataggaagattctggcagcctgcgatacacagtgggagatcagctccatgtacattgaacaagccagaaacataattaaaaatagagggcacgagattcctgaagaagacaagagcataatagaaaagttattggctattgacgaaaaagttgctgtcatgatggcaaacgagatgcttctggcgggaatagacacggtgtcttttgtcactgtcggtttactgtaccacttagctacgaacccacaagcacaggacagagtgagagaagaggtccgatctactggcactagcaggcggtatctgaaggcttgcttgaaggaatctttgaggatttggcccgtcatcccggctaacctacgcaggactaccagagagcatgtggttggagggtatttactgcctaaaggggtggaagtcatagccccaaacgagtttctttccaaacaagaaaagtactatccaaggcctttagaattcataccagagaggtggcttgcagacaagaccgatcctttgtattatggaaatgcgcaccccatggtcactctaccgtttggcttcggagttcgcagttgtattgggaggaggatagctgagttggagatagaaatattgacttcagctattgtagataattttgtggtgagctggcacggtccaccaatcaaagtaaagacaaccataatgaatttgttccagaaaccgtataactttaagtttgaaagtgtgaagtaatttttaaaggtaaagaaaaaagcataagtaattcagttaatcttaaaatatataatttgcttatagcttacctattacaaatcgccattatattggctttctatatttagcttgtatccaaactcggtacatggtcaacattttccccctattcacttggagtcttctatcaataagattctggtcttcaatgaattctttaaataggtcttttacctcctcttgagtgaagaagtaaaccatagtgttgtctcctcttgcatagaaattgtcagctacgcatcgccccttcttgaatcgcagttgagctaagtcgtagcggccatagtctcggaatacaactagccctccaggctttaggtatctgtagatcttgctaatgactgacggcattttggaaggatcaatggctgacaaaacaaagatcagtacaactatatccagagagttttcttcaaaaggaacttcccaatctgtagccgtagcgtcaaggacaaacactttgcatctgtttgtgtcatacaatggattctctttcattatattgattgcagttgatgaaaaatcacagccgtagataaacaggttggggtcctgactgtattggaggatcgggaatacagtgttgccaacaccgcatccaatttcaaatatgttgcgtctggtgccttcagattttggatcctcatttgtttttgaagtgttgttgccctcaacctctgggaatactctgactggagctgatgtgttgtctggggcaagttctgggaactcggtgaacaaccaatgcctgtctttgaaaaatctgttttgatgaatatcataaaaggcatcccaatgtttgtcagcattttcttctaaattcttcagctgctcttcattaatagttatctgtgagttttgttcaactttctgtttagcagcttcttcctgctcgctgtcccattggacattatcccaagcattgaaaagaaatgtttgactcttgtcatttaaatagcgtgagccacctttaggcttttttcgagacctcgttttttctaattcttctaaatactgtttactgcctttagtagtcagaaatctaattaaagatgccaatacagtaccacgcattatgcttaaagacttcttcagcgttttccaggaatctgttgccaaactgaggccttctatctgaagaagactcttccatttataacttatttatgtatgttatgaaaccaaactttacacaatctaatgagaaggtatttttgttaacattgaatgaagtattatattcttttccaaccagctctaactcggaaagtttgtaaaaaaaaaa

SEQ ID NO: 637 - DNA, 3388 bp, Plutella xylostella
gcggcgactgcggacgatattggccggccctgactgatgagagaacatgtgcgggcggcgagcggtcgggcgcgagccgagccgagggaggaggctgcggagatgctgctgatgctgccgctggaggccgatatggactggctgagggcggagctcggcctggctcccgggtggctgaggccgctggcgacgcactggctctgcctccacgcggcccgggcgctggatcgccgcgccgaactgaacgtttcggcgccggccagatctgcagtagacattggagcacattgatcggcctctgatagtccatctccgtcggtggctgcgagtgcagcatcaggggaggtgccatagccacagccaggtgctgtggagacatcttgttcctgtcttgagctgccacgactaaagctaagtggtctaagaggaagaccaaagtggcgcgggcggcgcgcggcaagcattccacgatggaagccatgaggcgggcgttgccttcccggtcgtctggcagacatactcccaatgcgtctaacgtcatctgatacaagcagcgactgaacagcggctgaggcagctccctcaaatagtccttcagtagaccagtaataacgttgatgtcaggaacagagtctggagccagctccacgccgcgagcgttcctctcgaatgcttctcggaggatgcgctttttgcttgctgagccgcataaccggtatagaccgataatatcgagtccccgtctctcgatctcctcgacgcagcggcgcacgatgagcggcacgggcggcgcgtgcggcggacgcacctctctagacacgacggcatcgagctccgcgccgaacagcggcggcggggagaggcgcgggggcgcggggcggcggcggaacagctcgtgcggctccgtgtggcgcacgcgcatgtagagcgtgccgcgcggctccatcttcaaagctagttgatggtcagcagccctcgccagcagctcgggcagcgtgacggcggcgcggtagcacagcttgtgccggtgctgcgggtcccacgagtacaccagcacgtccagctgtctgttgtccactagttccagctcgaaggactcgtcccagtcgaattgcagctcgccggtgcggaccacagtcctagccttatgaaccctgtcacactcgagcacacagtacaagtctctgggcgcgacgggcggctgcgccggggctagtgggcccgacggcggcgacccgggcgacgccccggacggggacggccgcagcccgcgtcccgccaacaggtgcacccacagcatcccggacatgccgcccccggccagccgggagagtcccgtcattgaggaggagagcccgccggtcgagggcttctcgaccttgtatttgaggaattcattagggttgatgtccaaatgtctctgatgcctcgagccgggcgttggcactgggctggggttgggacagttgaacctagaccccaactccaacagctgccttactcttctcgcagacggtgagctggatggcccgagctgctgcgaagacagcgagcgcgcgggcaggtggcggggacgctccacgcgccgccccgccaggcccagggtcgagccgaaacgactgctgttctccatattcttaagcgcgtcatgtatgttctcagcggagtagtgtgtcggcaggcgcggacgcagggtctcgtacagagcgctggtggacggcgcgcgcgacagccacgcgcggtactcgtccgacgtgaacactgatggcgacgaggttagacgacctctggaagagcgtagatccaaccgagaagacaacggctctggttcatcttgcaggacactgccggcgcgccgattactcaaacccaacctctgcccagtattcctgacgtcacgcggcaacgagttaaacttggagccaatatcccgtcccagagtgctactcctgtacccgctcagcccagaatagtacggggttcgagtcggggcagtcgcttctgtatccgacgaatagtccaggcttctattccgtcgcgctgtaccaaacttgctgctataagagggtaggccaagcccggctgtgccgtattgtcctagagtcgaactcaagccagctccagtcaatccactgccgactaatccagagctggttaatccggaaccaacaaggcttgagccggttaggccacttaatccggtggtggatagaccggagggtagcccagaaccggtcaggccgctgccggtgagtccggatgtgatgccttggcctcccattccgacggtgccgtagcgctggttgtgcgcgtatcttgatagacttgcattagtagcagcggaagccttcaggctggaccgcagcagcgagtgtcggccgaagtcggagtgcgtctccgcgcgaggcagctgctgctcggagccggagcgggggacgcggccgctgaactcatatctctgccccggctcgttcggatagaaggagtgcaccttctctgctaaactctcgagcgtgttggggtaggagcgctcgtagggcacgaagtgctgggtggacgaggacttcggctgctctgtgatcactggcggcggcggccggtagctccaagtagaatggtcggaaggtggtcgcgagttgtagtacaaatctagtgcgttggagtcaggagataaggctccaagttgcatgcggctgcgttcttcccggccgtcacccacgggacggatattgctgcccggcccggtcgaacgcaatgttccgtgttgcgagtacatgccgtcgactctgtctctttccctctcgtcgtcgcggtcgtcgcggcagtctcgcttcaacaccaccacgggcggcggcttgtgctccgagcggggtagggatggcgatcctgggccagattttcctttcctctgccgtgtgcacagcagcagccggcgcgggatggacatgatgatgacgacgtcgtccagcgacatgcgccgcacgtccaccaggttcaccgccaggatctcgtctcccaccttcaaacagccgctattatagaccgcagactccagggctatgcgtgatatgaagacgccgtcggtgcggccgccgccgtcgccctcgcggatgtacaggcccagcgtctgccccggacgcttcacgatctccaccagctggaccgcgtgccgggagtcctgtagcgagaagaacttcttggcggcctcgatgttgttccgccccacctgccggatctccaggatgcgcacgatcatctccccgcggcgctccaccgcctcgagagccgcggcggtggtggcgtcgtggtcgttctcgaccatctcgatctgtcggaagatctcattgctgactcctgatacggtgccggttaccttccggaagtcggg

SEQ ID NO: 638 - DNA, 1527 bp, Plutella xylostella
acagtgaaaacaatagtgtaatcatagatagcacataaacatatcaatggagatgatcaaaattatgtaaacttttaaattatcaaataaacatggcttagcctcgatatagctctaccacaatttgtctcatcgtcaaacgggacaacacaggaataatggaatagttatcacaaatttattgttaaagcacttaactttaagctttgtagacctaccttaaaatacaacacaatgcaaacaatcaaaacctagatcaatatcacatacggatacaaatatgtcacgtaacgtccgcatcgcgcaaaaatcacgcagcatttttcaaaacgaaataaaatggctgctgaattttgtttactccggcggtaacaaggttgggcggcgggccgtgccactccaacctgtatttgtctagaaccctggttgcgagggaggcgagcattttcccgactactccctcagctgggcaggattctccgaagggcatggacgcgagtggatgcgcccggctggcgctgagcggctgccagtctgaacaccatcgctcggggatgaaagctttcggtcttccccattctttgtcgcatttgctcgtcactccgtgggcaagcactatgtctaccccagccggcaccacatagtccgccaccacaaactcctcgcgactcctcctcaccacgcctccagtggccgggtgcagtctcagcgcctcccgcgccacccctgccaggtaggggagctcggggcagccggcgccggcgctccgtgaggccgccgcccaggacacctcgtcatgagctcgctgttgttgtgcggcgtgcagggataggtggtagagcatgcccagtgctgattgggctagcggatccgctccagccagcatcatatcagcagtgaccggcagaagcctgttcttcagcggccggagtttgtcgaggaggctcttttcaggcgctagctcgccggagtcaattccttctagtccttgtttcaggaaatgttccattaagctaaaatgagtatcaaaggccttcaacgcctcattaaacgtatccgtgtcgcggcgcagcgtgagttcgctccgcacgaggcagccggcggatgcgacgtcgcggctggcgcggacgaggcgctccgccgcggtcagcccggacagggagcgcttcgtgagcgagcactgggctgggggagcgtcgtcttcgagggaggtctgttccggggttctgttctcgtcggtgggcacatgcgccggtccgtcgagacagccgagccgggtgccgaacaccagcatccccagggactccagcgcccaccggtatagttccgtctctatttcttcgttcaacgcgttctctgcatgccgaagttcttctagcctcctagtggcgtctgtggcgatatcatcaaaagccttttcatagtttttcagtaacgatccgtccagcagaagagcccttaaagcaggccatattgccttcgattcatccctgaaatggtaaacaaattacaatcaaatgtaagtga

SEQ ID NO: 639 - DNA, 1256 bp, Plutella xylostella
gtgaaggggagcttcttcagcatctgctggtctcctcgactggtctccactcgcgaaaacgttccacagttaattattttttggcagatacaaaagatacatcttattacaatttttatcaccatttctgataggctccataagagaaaccctcaactgtactgggtttccttcatcatgagagcacattcacctccgaatgcaaccattaccttttctacacaattaaagatacacacaagctaggtttccttagaagccagtgacagctttgatggccttctcttcgtcgtagggcgtcatttgcctgttggagtggaactccatggtgaaggaagcgagccccgagctgagggaccgcagcgccgacgagtagccaagcagctctgatagcggtgctaagcactctatcaccttgtcccccctccgcacgtgaacctgctgcaggtcggcgcggcgccgcgtgaggtcggccagcacgcgcgccgagtgcgactccggcaccaccacctccagagacatcaccggctccaggaggatggactcggcttcggagaatacctttcgaaggcattgcacgacggcggcagacacaaccgaatctgaagtcccgcgtcccacctccagccagtgaagagtcacctgcacatccaccatcttgcagcctagtttgggtccgtgcagcagggccgtggagacgccttgctttacagctgtcatgtgacgcgtccatacatgcgcgagattcgccgcactctccggtgatttgtttaacctcaaaaccttatcagccggtactcctttgacagttttggctgacatggtgacattgaccatctgcttctggctgccgatcttccgctccagcacgaagttcctctgggcggcgcccagcagcgtctcccggtacgctatctggagaggacccagctccacgtcgatcttgtactctctgattatacgctctttgattatctctagatgcagctcgcccataccagctagtacgatctgtccagactcgtcgtcgttgacaaccctgaggctggggtcctctcgactgagctcggccagggctgtctccagaggcgtctggaatgccacgctcgggggctcgatggtgcacaggaacacgggctccgggacgcgcgcgcctgcggagaggaacctggttaggagagggaaatagatgtgtaagggtatgtaggctggaaggaagaacatgtttttaaaaaagagcaccctgtatacttata

SEQ ID NO: 640 - DNA, 784 bp, Plutella xylostella
cgcgcgccgctgcgaccccccaacagatatctcccaagtcgtattcccatagaatgagtccgtagcgcctttcaccaaaacggatacatgcgggccccaatatttctgccagttttgtttataacccatcgcttccactgcctttttcaaatacttcgcttccaaatggttcggagtcatgatgatccctggactcgggtagtttttaacaagggttacatctttagatatgacgtagagaccgtcggcgtcgattactagaggtttctttaacgttctgcaagtgttgaggatgttggcggtgagatggaccgtctctggagtcctgccgaggccgggcccgatgaccacgacgtctgccttgcgcagcacagcctcgatggcggggaaggtggagggggacagagtggggtgcacgatgaggtcggggctgtatgacttgatgaccggcgccacgctcgctgtcgtcagcacgtatactaggtctgcacccgcctttagagcggagattgcagcaaaatacggggcacccgtgtattcggaagatcctccgacgactactatcttgccagcatcacctttatgcaacccttcgagctttggaactacatttttagcaaaatattcaccaactggttcatttaaactatttatgtcgacacatttgttatttgcttcattcgtcacaacaaacgaggtgtaaaaactcagtaaaactaaggattttaacatattttttgtttataaacgctaaattttaatatgtgcatacgcagacaacctg

SEQ ID NO: 641 - DNA, 1020 bp, Plutella xylostella
cgcccacggccgccgcctgcacgcgccccggcgcgcccggcacgtcgcccaaagtctcaaaagtgtatctatcatcatgaggccacagatatggcggcgcggaggccacgtactgcaagcggaggcggaaccggtagcgggtcttcggttccaagccgctagccagccactccccgcctgcccgcttggtgcatggcagccattgctggctggaagtctctgtgtattctactttgtagtgatacaacgtataaccgctcggcgggtgccaagcgacagtggcactatacgccgtggcattaattagaccaatcgcttgcggcagcggatacgtcttcacgcgcagcgattggctgtcgacagtgactgtgctgtgattggaccgcgcgcggatccatactgtgtagactgtgttgggtgatagacgggtcatgttggccgctcggccctctgtcacctcgaaggtgttgtgctctttatacttgttgttgagcacgggcaggtggtcggtgcgccagtgcagctcgtaccacaggccgggctcgggcgtccactccacgcgagccagcacgggcgacagcactgtggccgtcacgtccgtcgctggtgagggggcttcggcagcagtctgcagcgtcatcgctgggccgacagtcggcttttcctcatgaagcttggcgaagtagttggtcacttccaccgacacagagtaattagtgaacggcagtagatcaccaatctccacctctttatccaccgtgtcgataaacttacaaactgccttgttgcaagccgacccgtcgtcttcactcttcatacggtaatagacagtatattctgacgctgtcatgtcatattgcctgtccctacactgctcaggtttcccaacatcaggtaatcgcaatgctatgctgtttgcggaattcgatatcatttttggagtcaaatcgttagaccacgggtataagcaatgttttggagggtacggctgggttctaggatctaaagctgcgattttat

SEQ ID NO: 642 - DNA, 692 bp, Plutella xylostella
cgctacttaacctatatgtacaactatatcacaagctgatgagtaaataatcataatcgttggtttttggttcagttaattaacaagtaacattcagtagtatcctccgtggatgccggaagctccgtatccgtagccgagaccggcgtgagagtagccagaggagtaggcgaggggagcggcgatggccgagtgtccgtaggtcagaggtgtgttgtaggctccatgggtaccgtaggctccggcagcgtaggcgccagagtaggccaggggagcggcgtgagcagcgtaggaaaccggggcggcgtgagcggcgtaggcgacgggggtggcgtgagcggcgtaggcgacgggagtggcgtgagcggtgtaagccacgggagcgacaacggcgtggccgacgggctccttgcgcacgacggcgttgaagccggtgtgggggttggcggcgtagtcgacgacgcggcgggtgccgtcggactccagcagggagtactgtccgaccacgctgtccccgtgccgggtctcgtgctggcccttcacgtcgccggtgtgcgggtcgtgcactccgtacgagaagctggactgatccacgccgtggatggcgctgccgtgcgcggcgacggcgaggagggcgaatacgacgaacttggctgccattttaatgcgtgtgtaattgataggattcaaat

SEQ ID NO: 643 - DNA, 6130 bp, Plutella xylostella
tcacaataattaatctaattcacctaaaactataaacttaactacataaagagtcgatttttgtactctaaatgatatcagataactaccagttacatagagagtctatttttgtactctaaatgaaaatcagataactatcagattaggtttaccagcaaaaaggaatagatgggacaagacaggatagtgaaaaggtttactcacacaccgctcgccatatcctccagttgtcagctgatgatgtgtctcaaaaacgtacccaacgcacttaacaaatttatttgttttctggttcttcttcacactcgcgaaaacgtcgctattttccccgcggaaagacaaaatatagtcctctatacgcgagaaaagcgcatgaaaatatccggaaggctgcgccagttaagttagagcgtcgcggaaggccgtttttaaaaacacagaatttttgattaattacgtttaatctcgacggagtctctacaggaactgaactacttgctaagcttaaatctaagaatcgcctgcggtgacgccgttgccaccgtggctagtcataacatcctcttggcttgtcagcactcttgaatactatatgactacattgtagcatgggaatggaatgtgctatttatgtttggatggatactaagccatgagaatgtataactcctccctccttaagttcgaaatcctcatttggggatttttccgaatgatgatttcgaatatccttcttatatctgtaaaggtaaagtaatacaataataatgattaaaattaagattacataaatgattactgttccgacactgatgcttttcacattgataacactttcattgactttgcatatcacttcactttcacttttcttcaataggtatgacataagacggatatctgaaagatcgatttcctccaggttgatggggtagctttccttttcaggttgtaggggtagaatttctggtaagctgagtaagggtaagtcagaatacttaattttttcaaattgtagagttcgctttttcagtttgtacttttctatttcaattatacaattttcattcatagtgagtatgtatgttccttgaatgttatggcgtgtaacctcgtccttacagacttgggtaagtacagagttgtccttggaatagagtatccagcgattaagttgtatgggggttaatttaatattttccagctttacataagttggtcggcatgacgtggcgttaggggtgcgtttcatcaagtctatgacacatgtatcctcaatgaatgcagacatctcgttttcattgcatagatagtattgttcgtcgatcttcttgcagggctgggagagtgactgagttttcaaccctttcataagaaggtaagggaatttaggaattataagggtagtttggttggactcgttggtggtaggaatggggagtattttataatatgtatatatatcttttttaattaatggaatttctaaaatgaaggttatctgattttccttaaaataggattttaattctattgtttgttctatctttactaaatttgcttcgtttacagggtatactaacttattattttcctctatctttttcagtatttgtaacagttcatctgaatctaatattgactgatgtagagtccttaatttactaaaagctatggttgtttccaactcatccaatctgataaaaagtgtctgaaagttatgaaagaaaagattatacactgatatgatttgttcacgtatttgtacagatttagttatattaatttgtttacgaagttcccaaattgctttatctaattggatgaaattgttctgtgtactatttgcaatattaacaaaggactgcaccatttcggtaaccaatgatagttttttcgcaacgttttccgtgcgtaattttgcttcgctgattaaattatcatacctaatggcgtcatcgttatctagatttcctgtaaatatcttaatgagtgaaccaagagggttcaaaatacctctttttattcttttagatggggaaatttgtcttaattttccgatggttgtatcctttatgtaatctgtttgcgtttttatattcgcaattcctacgtctaattttcctttaaaataactaagaacatgattattcaagttcgcgtatctatttacgttaaattctaaatctctacataataagcttatatttaataccttaaaaactatccacttatcggaactaataactgcttctccttttcggacgggcagaattccagcgccattattgactcgctgaagtcgaagggcctgggtcgtgaggaccacggccagtagcaggtggagaaacctgcggagggcgtttgacatctttaataggtaccttgctaaagcggtcccttttcgcgataacaggtacgatgtttctagagatgtctccagccactcgtactttctcaaaacggggtttatccttactacgtcggttatttatccctttaacaaagactgtgtcaccgcaatctatattaaagtcggtctcaccgccgcgtttctgaataatcttctcctttttattgatcatatgatctgttaggtatttatataggtatttagtccttttcgcgtgatcgcttattagtttttggtgatactgttgttcgaatttcacgttaaatgtactattagcgtctgtgtgtccaaaaacaacctcgaatggtgtaagacctgtagttgagtgtatggtttggttgtatgacatcactgcatacgtcattactgttgctgcgtcagtgattttgtgttcgtatttggctaggcgatatatttctaagatggttgaatgaaatcgctctattaaacccatagaggtcggattatgaggtgtccctatgtgtaaacggattttgtaaaagtctaaggtctcacgcataagtacattgttgaactctgatccaggatcagaactaatttttccgggtactccatatatagagaagtatttaataagcgctcttactacttcaggtgtggatttgttaggtatttcaaatgcttgaccaagtttgctgaaggcgtctattatagtaagaaatgattttccttctatggaaaacaggtcgataaagatttcctcaaaaggtcggttttgagtttgggtgagttgtaattcgggtttaaacggttttcggtcgtattttaattttttacaagcttcgcatgcattaatgatgcttgctaccgtttcattcatgttattccagaaatacgtacgacggagatgggttatggtttctttaatcccccgatggcaagttttcccttgatggtatttgagaactatttcgcgttgttcattttcgtcttcgacgtaaattactctttccgtgcattcgaataattttaccgtatctttttggaataatgatattgttgcttgggtgaattggatgcgatgttgtttttcgtcgaaataaaggaaatatttcttttttggtttaatatgtgttttcaggaattctttgatgaggtttggtgcatctaacggtaagtgtacttccaaaatcgattgttttttattagataggtttttcactgaaatttcgtttctattccaggaatagacaaggatttggttttgttttgtatctacggcttctttcagaataggaatacctacggtgtctatgtcatctgctgaatgggctgtaacagatgcaattgtctctttaccttcgctacctgtaattgtgctggaagtgggtgatggaatggaaaatggagatctaggcctatttgttggtatgcttaatgttttttccgagtctgatgataattcgattataggtatactattttcctgatctaaattaacatccattgaaatgttgtctttatccagtacatttaatttaattctcgatagcgcgtcagcgtttgtgttttgacgtccttcattattagtgtgttctaaacgtcgtttcaataagttctgttttagcatgttatctttttctctaggagctacttcgtcaatttccatcggtgtgtagctgactaggcactcaaattttgtgactttaatgggttcggtaaactttaaatggactattttatctgttgtgttttggattacagtatgggcaaacgaatcaacacatgtaactaaagctgtaggcatacgaacgccttcaccgaaacaaaggaagtctacgatggctgtaccgttctgtaagttggtaggtattttaacgcgtgtctctgttcgcggttccagacatatctcatgaggtggtgtatatataataggtatacacgtatcgcgcgtctgtagcacttggtgatccatgttaatggtagcgcctaactgttttaacaaatctgaacctatgaggccgtcatatctcttgtctacatcatagataaagaatttgtgtcgtagggtgctcctgaaagttttcagtagagggatgtatatagcctcactgtgagtactacgggcatgcgtactgatgacttcgaagggttcttcaaatttatagtcggtaaaatatttttctacaagctttggacttatgaaagacctagtactgccggtatctatcataaatctagcccctatttcaggtagtactatgtgtggtaattttaaaatgctatcgcagtttaaatgtattatttctgatttatttccgaggcttctatctgaaaatcctggttttcatcattttgttcgtaaattacgtcatctgattgtgtaaaatccgagtaatagccgtactgttcatcgttttccggtgaatagtaattttccggtgaacagtaattttccgaggaaaggtgattttcctgcgcgtctagttcgttggaataaaagacgttattttcttgtaacatgttttgtcgaaggggtgcagctgtgcgcatggagacgtcagtggttattggtttattgttttggttgttaggtggaataccgaatttaaatttattttggtttccgtgttgcgcgttaagttgctgttgcatcggtggacgccactgctggttcggtatgccgaacttgaagttattttgttggtttggaattccaaaacggaagttttgctgtgggttattgggtctgaaattgttatttatctgttggttaggtataccaaatttgaaattttgttgtggtctaaatcctgcattttggtttaggccaccacggaattgttggttattattattattattaattccaaacttaaatccagggttttgctgtggaataacaacattaggtgtatttgagtggggtgaagttaatttggtggatttattatttttcgagttgtattgaaattggaaattaatttcctcagtgacgacgcttaaagccgcctctagggtggtacatccctttaaacgaactattcgtatcatgtcctcgggtagattatagaggaagacatttaatgccgaattattataaatgatcatctttgcagcttttacaccttcgtctacaattaaattaaccttggacagtaatgcgctcttcgttaattgaattctactacaaaaatctatatacgattcgccaggtttgatttttaacgattctaacgtaatcgcgatgcattcttcggatctagggtcaccgaaatgttgtagtagcaatgcacacagttgttcccaagttgttatatcttctcgttcgctgagcaaagacgcagctttgccctcgagcctgcttgtaatggcatgaaaaacatacaggttttgagctgcatttccctgaatggaaaagctcctcaaaatgtactgagactttcttatatataggtttaggtgtcccggttcaccattgaacttaggtatcaaacacaaaagatctctcgggataattcttatttgctcttctgtatggttttcttgggcagttgccattttattatatttaatctaattatcttaactaaattaatcctaatttgtgcgatttttgtcacaatttctaatctaattttgtgctatgtttgtcacaattactagcctactttttgtgcgatttttgtcacaataactaaactaattttcataaaactataaacttaattacataaagagtcgatttttgta

SEQ ID NO: 644 - DNA, 1335 bp, Plutella xylostella
gtcgtgaagattatcagaatagaactttcgtcaaaaatggaatggaattttaccatttacaaataatgaaaaattatcatgtattgatatgggaaaccgtagacaatctgccagaactaacataggatctgttgtataaaagcagatgacaaaaaaaaagatcaattgacaagttttaccctgatatatttgcaggtttacccatgagaagtacaggataaaaagtaaaatatactttaagttctgatctgcatgagacatggacaaattaacaaacttttgcattaaaaaattgagtatgtacggatgaacacttgttgaaattcaatacctttgtttcgtcacactgctttcacacaacaggtcgttatgaagatgttattactcgctcacggctcgcctcacttgcagccggcctccttcgccgcatgattgttggactcttcagtcttatcaccgtcactgtagaactttggctcatcgtgcttctcctgcgcgacgcggtcatcgtcgtcgtcgctgtcgtcgtcgcccgacgagtccccgcccgagcccgcgccctccgccggcttcactgggggcgcggccgggtcggcgtcgcggctgcgctcgcgggtgagctcgtcgtagcactgcaggcacacccgcagcggcttggagctctggccgcgaaggagccagcgcttcgacgaacagccgccgcagactaccgagccgcacttgcgacagtggtgcctcctgttgagcacggtgaactgtgtcttcttgcagtgcatacacacggtggcctcgttgtccggcacccacaccgccgcgtgctccgacgggggctgcttgccgctctttctaagtaaatcctctatacatttttcaatatgtgccatccactcttctttttctgtggcagtggctgcatacactgcaaatgattttgacgctgtgcggatcaaccagccattgcggtgttgtccttcatcctttaatgattctagcttgacttcctcgagggggataacatgctgtttgttatatttcttcttgtttataactatgttgccgtacactagtatgtcattgaagaggaagaattggcgtgcttttggcttctttcggcacatttttgtcaagactccttctccaaccagcaccctgccttgctctgccagtggctggcccgaactgccgaagcagttctccaccatggcaattcttcttgcattagcctcactattcactaaacgatccaccattgtaaataattttattttacgtatcactctcacaaaaaggaaataataaattgtgtgtttgagcgagaaaatgtgtcattcactg

SEQ ID NO: 645 - DNA, 1846 bp, Plutella xylostella
ttgcattacagtttcattcctcgttcattcaattggtcatcgtataaattggtagaatgcaaatgtacttatcccagatatttactctcgtgttaattttatcccggtataacgtgatgtttggtcgatccaccctaaatgagataaatttcagtaagtaagtatactttgtaagatatagcatgagtcctatgacagctgccaaatccatacatttatttataatttgttagttttccagggacaacgaacttaaattacctggcgtaaccaactgtcaatcaaacttcataaaactcacgttatattttacaaagcatagctcctcaaacaaaaaatgaatgaacgaagtcatccgccatttcactcaaagaatgaacgaaccacgccaaccctcacatcgcttgacacatctaaaagaatgaacgaaacactgaccctcaatcacttgacaatgaaggcgacgttgctatcattctcgagctgttcctccagctgggcggctgtcaggcctccctggcagcagagctcgtcgagacagaccagtccgttgtaggtgcggactagaggctggctgtgctcgctgcgcacgctgtctgcgtcgtcgtcatcgtgcgttatgttgattgggtacttatagaccctgcgtatgagtccctcgagcacgccgaacagcaccagcttgcgctcgttgatggcgaggtcctgcgggcgcaggcgccggcacagctcccggatgcacgtgccgtacgtcatgccagcgtacatgcggaacgcgtcgctcactttcgggagttggcgggcagacctcgccgcgaactccaagcactgccgctgcagccccgcgcaccgcgtcagctgcctcagcttgggcgtcgcactgtacaccgcacagtactggaacatgggcaccagcgtcaccacgccgtagtacaccaggttctggacgcaggcgcgtacgaggctgacctccacgtccgtgagcgccgcgatcttcgacacgtggttgaagccgtctatgtagggcaggatctgattggtggtgaggtcccactggtctggtgcgaagctgtgccggctgtacaggaacacgggcacctggtggtcccgcacgggcgccgggtcgctgttcacgcgcaccacggtcaggtgcgtcgttgtggtgcccacagtaagcgtgcacatgcggcggctgttgatgtcgcgcatgacctggcgcatgaggccgcccagcgcgcgcgcgtcgcccgagcgcgactgccgcgacagccactccgtctccagctccatggatagcagatactctgtgagtttcttgactagtggctcaaggtggacagtcctcgcccacgcgtcacagacgaagcataggttgaagtagtatgcattgcgagcatacttcttgttgtccagccgaacagggaaacccaggatcttcgacccaaggagggttactgtcaacgtgcaccgctgcaactgcactttaggtatgatataatggctcacggtgtcgaagatatccttcgaaatatagttctctggcacctggcaggtgatagtgggccccgccgtcgggtggaactcgcacagaaatatgcaccggatcgggccctcctgaccacaaccttcgtaatatttggcattccctatattttcatccatcgtcaacttcctaaattaaacttatcactataacacagatttgtccattattttgatttgtgtgctttttatttgaccaataaatcactgcacaaccactgaattcactgatttcataaagtacctacacgtaaatattttttgtatttcgcacaattttgtgtagcgcttcgcttcacagtat

SEQ ID NO: 646 - DNA, 516 bp, Plutella xylostella; identical to SEQ ID NO: 582

SEQ ID NO: 647 - DNA, 603 bp, Plutella xylostella
aagtcgttgaagaaagggaaatgaagcggcatttgcttttattcggggttgtggcattggcgcaaagtggcccggtggaagaagagacggagggccgtatgcacattgcgccaatgccacaaacccgattaaattaagtcgttgtacaaagggaaatctagctgcttttgcttttattaggtggtttggcattggcgcaaagttgcccggggtaagaagatgcggtgggccgtatgatggctggaaccctgactaattgccagaagagtgatgtgaccctgtgtttgaaggagcaagctctaaaggcagccgaacgactgaggaccgtcagagaactgcaactcacagaaaacatcgccatcatcaacaatgtacctaaagaagctaggagcctcgaaccccactctacagaactggaagccagaagggaacaggtctctctacagaattggaagccagaagggaacaggtcaatcagcgactatggaccactgctgcagagcttatggataactctgacgtagaatacagcttcgatgatggttctgaagacgaggaagagtccagggctattggagttgaagcccgcagcaagaagaagaa

SEQ ID NO: 648 - DNA, 2512 bp, Plutella xylostella
ttttttttttttttttttttctgtcatgtcattgttatcagctgctgtttttgtgaattttataataaggtgaagctctccctcatgagccccttcctgaaagcttcagccaccgcgctgatggaccagcccgtggtgaatgctgtcatcgttgatgagcagatcgtagctgctgtttttgcgaattttattataaatggaagttatgaatattaaggtttatcctaatgtgttagtatgtttaggggaaagttgattcgcttggtatcacgaagcactaaaacatgggctggtgccaaattaatttctacagtcgagctgcaagcgaaacaaatgcaatgcataatgcaccaagatttaccttcagtaagattacccaaagaaacgtcgtggaaatgtcgaagaattcatacgagtttaagagcacacggtatcgaagaggtgaaagcgccaaattttcctgattcaataacttctggagatgttaagctaataaagaaggaaggtgacccggtggctgtagacgaggtggtgctcgagatagagacagacaagacggccatcccagtgatgtctccgcgacaagacggccatcccggtgatgtctcccggacaagacggccatccccgtgatgtctcccggagacggcaccgttcagaagatactggtcaaggatggagaagcggtcaaatcgcagcagccgcggagacggcaccgtacagaagatcctggtcaaagatggagaagcggtcaagtcgcagcagccgttgtttacggtgaacgtgacaggagtagcgccagcgccagctaaggctgacgcaccccccgcgccctcgcctgcccccaccacaccctccgcccccgctgcccccgctgccgcccctgctccagccgctcccagccctagcggaccggttgaagctactgtggtgaagaagaataagccaactaaacctgccactgctgcaccgcaaaggttagcggaccccacaaagacgatatcgggcacgcgcacagaacacgcggtgcccatgaacaagatgcgccggcgcatcgcgcagcggctcaaggaggcgcagaacaccgccgccatgctgactacgttcaacgagtgcgatctcagtaaactgatggcatttcgcaaggcgaacctggaggcgttcacgaagaagcacggcgtgaagctctccctcatgagcccgttcctgaaggcatcggccaccgcgctcatggaccagcccgtggtgaatgccgtcatcgtcgatgagcagatcatttacagagactacgtggacatatcggtggcggtggcgacgccgcgcgggctggtggtgccggtgatccggaacgctgagtccatggactactccgagatagaacgtgacaggagtagcgccagcgccagctaaggctgacgcaccccccgcgccctcgcctgcccccaccacaccctccgcccccgctgcccccgctgccgcccctgctccagccgctcccagccctagcggaccggttgaagctactgtggtgaagaagaataagccaactaaacctgccactgctgcaccgcaaaggttagcggaccccacaaagacgatatcgggcacgcgcacagaacacgcggtgcccatgaacaagatgcgccggcgcatcgcgcagcggctcaaggaggcgcagaacaccgccgccatgctgactacgttcaacgagtgcgatctcagtaaactgatggcatttcgcaaggcgaacctggaggcgttcacgaagaagcacggcgtgaagctctccctcatgagccccttcctgaaagcttcagccaccgcgctgatggaccagcccgtggtgaatgctgtcatcgttgatgagcagatcggttcctgaaggcatcggccaccgcgctcatggaccagcccgtggtgaatgccgtcatcgtcgatgagcagatcatttacagagactacgtggacatatcggtggcggtggcgacgccgcgcgggctggtggtgcctgtcattaggaacgcggagtccatggactactccgagatagagcgagccatcgccagcgtcgccgagaaggcacggactggtaacctctcagtggcggacatgcagggcggcacgttcacggtgagcaacggcggcgttttcggctcgctgctgtcgatgcccatcatcaacccgccgcagtccgccatcttgctgggcatgcacgccatcgtgcagagaccacggcatgcacgccatcgtgcagcgacccgtcgccatagccgggaaggtggagatccgtccgatgatgtacctggcgctgtcgtacgaccaccggctgatcgacggccgcgaggcggtgctgttcctcaggaaggtcaaggctggagtcgaggaccccacgtctatcctcgcagcgatctgaatgacgtagtgcatcctcgccgcgatttgagtagtagtggatgagatattagtgtttataaggattatgttattaaattatatttttttatgagaaaaa

SEQ ID NO: 649 - DNA, 470 bp, Plutella xylostella
cgcccagtactgctcgcgaaccacgccagtaggctgttccaggcgaccaccgagatctacaccctatcctacactctttccctacacgacgctcttccgatctcttgtattgtcctcaaatcgccgcggttgctcagctcgccactatacgcttcattcacatacacataggtactgttcttggccggcaagttccctccactcggccttcgttcgttcagacctggggggctacttctgcccttcttaattcttagccggcaagttccctccactcggtcttcgttcggtcagagccggggggctactccggcccttcttcatgtaaggatcggtggtgtctgcggaagccatggcgctcacatgttcacggtaggggcgggaggaggctcgcggtgcacagacgtgagatcggaagagcacacgtctgaactccagtcacagcgatagatctcgtatgccgtcttctg

SEQ ID NO: 650 - DNA, 2498 bp, Plutella xylostella
tgaagtttttttaatctttgtcgctgagcttctgttctattgttattcaattttagttgatttcgctcatttatcaggttctctatgtttttggtaataaaaaatgaagagaacctgataaattctgacagtcgaaaactgacagactattttgtcaacacgtgctaaataaaatgccacagccaaaaggaaacactacaaaaacttatttaataaatacatatgtcatctgattatgcaagttacagcaaaaaacgagaccaggagactcacacgccgatgctaaaagtctttaaagacatgatgaacaagaaagataatgagattgatccagaaagggtgagcttgttgaaggataataagtcggtaaagaatccaaaatcataccatgttcaccatcagcgggaagacagtatggagcacgataactcagaagagacgaacagcacaaactacgagtacttgcggaggcacggcgacacgggaagggcggtgggcgacaccgactttgaagtctacaaatgtagaaaagattgcccgataaatcgtaagcccgaaaagaagaaaaaggagaaagataaacttgcagtggctgttaagagaggatgcaagtgtcggaagcaccgacaaggcagccagtccacgcagacatcggtctccaagacgtccaccgatagtgaatcaacaccaccatcaaaaccggacccaaaagttgaggaagcgaaacggaaagcagaaagagatagaaaagcggcggaagcagctaagaaagaagcggcaaagaaggctgaagctgaagctaaggctaagaaggaggcagcagcaaagaaagaagcagagaaaaaagaggcagagagaaaggaagcggagagaaaggaagcggagagaaaggaagcggagagaaaggaagcggagagaaaggcagcagagaaaagagcagcagagagaagagaaggagagagaaacagagccgccgccgccgctgctgcgaagaagaaatccaagtctgactctttctctgattgtggttctgatttcaaatgctatttcaggaagctcttcgacaagctggaccaccgggcgctgtgcgtgctgttgatcatcgccatcatcatcgtttgcaagcagtcggggcagtcctgcatgaaccagctgcagaacagcgggccttggagcaaccagaggcctagtgtgggaggcccccctatgcccataaatgtgccgaacatggtggctggtccaggaatgatgagcgctgtgaggaagaacttcaccctgaagagagccaagccgctggtgcagacctggagcgtcgtggatgaggagggagaacaggagagataccttgcgaggagagacgtgggaagtgctcacaaaatcaagcatcatgactacacgggggatgcatacgaaggaacggatgtctcatcgcgttccagtaacaagtacggggattcagcacaaaaaggtgggttaatgccgagaagcgatatcttcagtcgactcaactttaatgcgttggaggaagactcttgcagcaaaagattaagagatttctatcaaagacttttaaaagtagatgctgaattagagaatatgaagtttgaagaaaaaatacctgaaaataggtacaaaattcgtgaaaaacgttcgtctcgtgatatgataaagaggaacattagtgatacaaaaatatttgaaaaacccaatgatattaatagtgtaaaaatcaattctgagtacaaaatcgaagaaataggtgataatacgaataaagaaagacggaacatagaaataacaaataatgctacgcctccaaagactattggaaataagactgtgacagttgaagtattagataaggatgataatgagaaaacttccgcaaaaagtgttaaattgcacgacaaatcactgaaacatcataaaaagccattcaaacttgaagatgtttttagtaaaatgatcgataaatatccgaaaaatactccagagactttattagaaatagaggaagcagctgacactacagacggaaaaattgatttagatagtgtttcaaaaatacttgatgcgaaattaaaaatgaatgacgaaatgcagcaactgttattgaaatctaaaactgacgaagctatggatagaaaagttgataactctggaagttataacgaaaactacataggcttgccatggttttatttttcaagtttcgttactgcatctacaactgctgagccacgtgtggaaaaactttcactccggaaaatcctgcaggctgatgatgactatactgattcaatggaatatgtggaagccgatgatcacaatatcaatcatgatgatctagttaagcttaacaatatggaaataccggctgttagaatgtacagaagagtaccccattatgatgatgatgatgatgatgacgtaagcgatgaaaaaactaggactattttcgaacccaaaggtccagcttcttcaaacatattacaagt

SEQ ID NO: 651 - DNA, 1647 bp, Plutella xylostella
acgtgtgacctcttcggagacggtcgcgggcgcagcaaaactgttgcagaaacttgaatgcggccagtatcgcgcgcgcggcttgcagcgtcggacgcaccaggggaaaagaaaaagaaattctctttttaaattttatttatggtgctggctgacttttgaaatatattttttaatctgtgttcggaaatttggcgggatgcggttcgcagcggcgcttgcgctgctttgcctttttggcacagcacaagcccagtacttcggcaaggacctaggcgcgctatcggagctgcaccacggcgtgcgcggccgcgtgtttgctgttgactcgcgcaccctgtatatcaaggacttcacttatgatggggagggacctgcggcctacttctacgtgggcacctccaagtccatctccggctcgggcacccgtctccgcgacgagcgtggtgcctccgcccctctccgccgctaccggggggagccggtcaccctcaccctgcctgaggggacttcgctgaaggatgtgaaatggttcagtgtttggtgcgacgagttttcggtaaacttcggtgacgtgcgcatcccacgagacctggagtatcctcgacccgccaaggtcggagccctgtctggggtgcacggagtctccagcgacaacattgtggtggtcgacgctcagacgttgttgatacccaacttctcttacgatggcgaggcaccagatgcgaagttctgggtgggtcgcggggacaagccctcgccccagggcatccgcatcccggacgagaacggcaaggagactccgctgcgccggtacgaccggaagaccatcgtgctcactctgcccggggagctgacagtgttcgacatcggctacttcagcgtgtggtgtgaagccttcaccgtgaactttggccacgtggctctgcccagcaccaagctgagcaacgtgccgcccagtctgaagatgttgggggtttcgccgcagtcgaagctgaactgcgaggtgttgtatgaagacatggcgttcgaggtgcgctgggcggtggcgggcgacagcatcgtgttgcagcttgtggctaaactcgaggacggcgagtacatgtcgttcggcctgtccggagacgccaccacctcacagatggtgggcggcgacgtggcggtggcgtgggtggacaagacctcgctgaagggctacgctcacgattactatctggacgcgaagagccagtgcgcaggagttagggggtcgtgcccggatgagcggcttggggccaagacgaactcgctccgtctgctgaacgcagccctggtcaacggctactccatcgtgacgtaccagcgcgggctgcgcgcggcggaccagctcgaccgagccatctacaccaacgtctcccagccgatcatctgggcgacaggaccgctgaactcgaggaacgaagtgtcttatcattcgcatttcttgaagggtgacaagtccatagagttcggccgtccccccgtgtggaactgccccatgcccgagacagaggaggagggcaaggagccggccggggtgccgccgccgccgccgccgcgcaagcaggaggttgttgaggacagccccaagccagcctacaagccgaacccagtgccgccccccaagcc

SEQ ID NO: 652 - DNA, 1647 bp, Plutella xylostella
acgtgtgacctcttcggagacggtcgcgggcgcagcaaaactgttgcagaaacttgaatgcggccagtatcgcgcgcgcggcttgcagcgtcggacgcaccaggggaaaagaaaaagaaattctctttttaaattttatttatggtgctggctgacttttgaaatatattttttaatctgtgttcggaaatttggcgggatgcggttcgcagcggcgcttgcgctgctttgcctttttggcacagcacaagcccagtacttcggcaaggacctaggcgcgctatcggagctgcaccacggcgtgcgcggccgcgtgtttgctgttgactcgcgcaccctgtatatcaaggacttcacttatgatggggagggacctgcggcctacttctacgtgggcacctccaagtccatctccggctcgggcacccgtctccgcgacgagcgtggtgcctccgcccctctccgccgctaccggggggagccggtcaccctcaccctgcctgaggggacttcgctgaaggatgtgaaatggttcagtgtttggtgcgacgagttttcggtaaacttcggtgacgtgcgcatcccacgagacctggagtatcctcgacccgccaaggtcggagccctgtctggggtgcacggagtctccagcgacaacattgtggtggtcgacgctcagacgttgttgatacccaacttctcttacgatggagaggcaccagacgcgaagttctgggtgggccgcggcgacaagccctcgccccagggcatccgcatcccggacgagaacggcaaggagactccgctgcgccggtacgaccggaagaccatcgtgctcactctgcccggggagctgacagtgttcgacatcggctacttcagcgtgtggtgtgaagccttcaccgtgaactttggccacgtggctctgcccagcaccaagctgagcaacgtgccgcccagtctgaagatgttgggggtttcgccgcagtcgaagctgaactgcgaggtgttgtatgaagacatggcgttcgaggtgcgctgggcggtggcgggcgacagcatcgtgttgcagcttgtggctaaactcgaggacggcgagtacatgtcgttcgggctgtccggagacgccacaacctctcagatggtgggcggcgacgtggcggtggcgtgggtggacaagacctcgctgaagggctacgctcatgattactacctggatgcgaagagccagtgcgccggcgtgagggggtcgtgcccggatgagcggcttggggccaagacgaactcgctccgtctgctgaacgcagccctggtcaacggctactccatagtgacgtaccagcgcgggctgcgggctgcggaccagctcgaccgagccatctacaccaacgtatcccagcccatcatctgggccaccgggccgctgaattcgaggaacgaagtgtcttatcattcgcatttcttgaagggtgacaagtccatagagttcggccgtccccccgtgtggaactgccccatgcccgagacagaggaggagggcaaggagccggccggggtgccgccgccgccgccgccgcgcaagcaggaggttgttgaggacagccccaagccagcctacaagccgaacccagtgccgccccccaagcc

SEQ ID NO: 653 - DNA, 7835 bp, Plutella xylostella
ttttttttttttttttctctatgtagtctttcaaaaataccacataatataaggtttatttttattattaacaatctgaagtctcatatgagacttttaaaaatctattgtatacctaaataaaaaagaccgcgaacagctatgtacataacctgaacataatgttttaatacatatttttttattaaaatataagcgcggcccatttcatacccacagaagtcatttgttgagttaaacaataacaactcccagtaatggattcaaaggcgctgcgcagcaaaaatattaacaataaaaacaagaaggcttcgtctaaacagaaaactaataaaaagaagaaatgcgatgggccaacatgttctatgtttttatctgaacttacaaaaaaattgcatatgaagaagaaaaatgaagaagagaggcctaaaaatatagttcataccataatagacagcataagccatgcgttgccggtaaaattttcaaggacttcaccgccaaaacaggactctccattgcaaatagatgcaatacaggacctggctccagagttactgcccaccgatgcaatggaagtggacctaaacacaccacccgaagtaccacctccagaaaaaaatattaatgtcattcaagagcacacttacaaaccgcttgctaaaaagacaccaatagacaccgagctcaaaagagtgggtttaaaaccgggcattgtcaaggcatctcgaataccattgaaaactattgaccttaaccttaaaaatctgaagccattagaacaacctaaaccggtggtacgcaaagaggacgcgtcagtcaacactgcggtggatcgcgatgtcgccagtgagctggcaagacatgtgacgactttgcgtaaaatatccttgattgccgaagaatttaaccagaaaacagccagaaatctaaaagaaattgttgacagcgtccaagaggatttgctcagaaaactgaatgaagcacaagctgaagaaaatgcctctttttaatgcaataagtatctttggtatttgatagaagaaaaatattttgattactttatcaatttgaggttgtcaaaatgaattacaacaaaattctcagtgccagtaaataaagttgcaatacatcccagttttaactgttttatttaaatgtgatttatataaattcaaacttatgaaaaaaacaggcggataacatgaaaaatctgtgttttgataacccatcttgaaaaatcgtggatgttgttttcattcagctataagcttcagatgtacaccatacaagaattggggaaccaatccacacataatttttgagacgagttttatccataatagcatactttttgaaacgcatttatatttttttttattctcaatggatgaaagcaaacacagtttaggggaatccactacaggcgacaaaataaatgaacacaatgactccaaacagttcgacaaagttatggaggaacgaatagaaaatgttccacaagaacacaggaagaagcgattacagggaagcaaattaccagtattttatagctcaaattcttctgttgatcattcaggccacactttgggggcaaacaaaaaaaaaagaaaaagcatagaagacgcgcatttaggtaaaaagacaaagccaactcgtataccgcgtccaaaaaagtgtataacacgaaaatcatcgatacattccttacaaaaacatgttgaagaggctgagaaaaacgtggtgcgagtccatcgactctgtctgtgctcggaagacggccgcccatacaattcttggcctatcggtttggcgaaagagccaaccagctcgcggccgatccccaacatcaccagcacttacagaagaacaatagcgagcgaacaaattaatgattggttgcgggaaaatgtaagcaatccgaacatggtgccacgtggagccaccaactcagctcatagctacattgatgacactaatttgggcagtacaggtgccccagaatattacttggatgtaaaaacaattaactcaaaattactccacaaatgtgctaaaaaacagaaaactaataccacaagagaaaatgaagtggaaccaatacgacaagaccaagacctcgaaactaaaaccgcagaaaataccagaaatatcaatgaaaagaaagcgtcgattgaaactgtgccctcagaggttgaacaaaatactaccgacttcgaaagagatggtcacgtgatagacgtggtgggcagcagctggaccgagaccggcatcgagaaccgcgaggacgatctcactgagaagccgagtgactattctgattgctatcaacaacggtatgagaccccgattaccgcatttatggcagaaacatgcaacacttccattaaaaataatgtttcccacgaaagatctaactattcaggccaatcccgtttctcaaagttcaagtataaatgctggtattgtcggcaaaatggaaatggagaaggcagcatattccgacgaagaaacaatacaagaggtatcaatcgaaggcgtttcaatttcaactttatgaaggctagaactgtatcgcataattggattaaacgtcgtcctttctacaaaacgtttaatcagaaatctgtgtggaaagagatcggatcacagacgccagcgacttgcctccgtgatagaagtataaattgttatatcctcaatacaaaatcaagagtttcagcatacgttgtcaagaaggccagtcctgttataagtgctgcgatatcactaggtgatccacaatctttggtttcatctaacgaaacattagattcgaatatgaataacgcaaatgaaataatattaagcgatgagacatcgaaaaatatggaaagtttacaactttctacaaaatcacatagcgatgaaatagaacagaacatttccagtgacaatgaagataacttagtaagatctacccatgaagatttcgaagatataacaacggaaaacttcttgacattaagtaaccaagaaatcacaacatcctctaacgaaaatttaaaaatgaatggcagcccaacggcttattcaaaaaatactagcattgatttagccatcactaatattcctctatttattgaaaaacctttagtcatacacagcagtatggaacaaaccaacagttctctaataaattcaactccattagctcctgatattgtgctacctttatgccatgatatttcttgtaacaaagtattttgtaaaccttccatgagcaatgagcctatcaaagcagaaaaccctcaagtgactgttgagaaacatgaaatagaacccaacgattccacattggaaaaagcaaatgaagccaattttttgataattgctgattgtcgagacaagagcattacagtaattccagaaatagcagataaatcaacaaacatgtttgtagaagcaaatgatatggaattaaggccttcaaagttttctttttcctcttcttttaagtccattgctgatgttgaaactagtgtaaccgcattaaatgaaactaatatgcatgtcataactaatactaaaaatataaatgctccatctcattttaagctcaataaaagatcattattttcttctacacttcaagtactaagtaatgaggaaataaaaaatagaaaaattaaaagaaaagataaaaaaactagatgtaagccaaagaaagaaaaagtaggcttcaaaatggatgattccgaaaaaaatcaagatattaaaacttgtaactcaaaaccaatactaaatgaatcttttattacttcagataaagatataaacgccgtcccaatattggtagataaaataacatacatagaaagcagagatttactagtaacgactactcgagaacaaagttctaaaatagtaccaacagaagacatgggaaataaaagcatgaatgacagtgacaaaaatataacactttctatcgacttaaaattatgtcataggaaagataacaaaaatgtgcataaattaaaaaacattagaaattctactgtcaattatcaacatcaaagtagtaacacgcctttatcaagaaaacaacacttttcgtacgctaattcttttatcacatcaaatcaagatcaagttcattcaagcagaattaatccaattaatactttgaaatataacgatgataaattgaaacagtctgaagaaacaccgaagtccaatcttttatcagattataataaccgtgataatgaaatcaaccctttgaatgatgataaggaatcgttatgcttaaaggatatttacacatttgcatctacacatagacttaaagccaataagaaacgaaggaacaggagagatatgactgtaccgaacgcaacagccactttgtttagctaccctattcctgattcaaaatatgtggataaacagaatcaaagtacttcagcaatggttgataatagtacatcaggaatgtttcatgcattaaccttcgagtctgcaattcaaactaatgaagaaccgagaaaaaaggaaacattaattgagattcaaaaagataaacagatacatgtttctgttttgggtgaaccaaaaattgttgtagtcggtgttaatcttgccgcagctcctgatcatcgtaaaaagaggtctaaaatgacggcttgtaaggcaacagaacaatctgttacatcgtttcatcagagtgaacgatctgacgaaagctcccggaaatcatttgaagactcccgaaaccgggaagagaacatattaaaagctttcgtggaacctacaccaggggaatcgatacaaatcccaacaaaactacagaatgagaatctgaaaacgtattccaatgatgaatgttatctgcctgacagaatatctacatcgccggattatcgtctatcttcattcatggatgaaagcagttttcaacacaaattcacccaaatgttgtcattcccaaatactggatttgcgccatctatatccaatcgcgaggatcagaaagtttcggaaaagataccaaaatcagtgataaaagctgacccgttattattatgtcaaacgcataagaaacttatagttttacattcgataaactttaccatgaatcctttcacatcaacaaataagccacaacaaatctctgatgatctaacaaataacaaagctgaacccatgacagagtctatcaataaaaatgtaagatatcacactaaacgaaagtcaaatcgaatagatttgaaaagattcgataaaaaaatcaaattcgacaaactcttagctgctaaggttgaacctgataaaatgtttattccgtcaaaactaggaaccgatccaatagtcgcaaggctaaaagccacaaacaggattcgtaagaataaaatggcatcacgcagggttatgttacgcagtaccaaattgcgttcggaccgaaaaaaacttgcgcaattatttggcaaacgaagatcagtggtggaggtggttgcggcggcggtgccccccgcggccggcgcgcccaccgccgtcgacgaggaggagtgggagttcgaggaggaagaggaagaagagtggcctcacccgccctggctgcctcacccggaaccaatattcaaaaccaacgttgaatttctcaactctttcttcacaacccacaaagctgagctcatccggttcgctttgaacaaatcgtttatcgatctcagaactcagatgaaacgtattcacctgtaccagcataatttgaaggagttgagcatcatgatgtctgagggtgtgactgagctggaggtgttgaaggagccggagagtataattccgtcagctgtgatggggtttggtcagccggccgtgccgccgccgccgacggggcaccgcggctgcattcagcgccagagagcgctggagaccaacctggacgctgtcaccaccctcttcacttgcgaccgcgccgacacgtgctcgtgcaactcacactccaacctcatcggcaaacggttgattctaaatctggattctatgaacaccatgttcaccagctgcaagcctaacctgaaggcgtgtgtgtgcggccctcccccggacaacaggtacaagcagtggccgatatacagcctgactgagatcaaaacttaccgtgggtttggagataaatttggcctgaaggaggcagcagaaagtttgtcatctgaagatgaagaaagtgatacggaatcttcggattcatcttgtgatctatcttcggaaccatcggaacatcaaattacaaataaagtggatgattcagtgccaaataaagagcaaaagatcaaaaaaaaagttacatactgcttgcctgatgaagatgagagcataaatcatgaaaacgagactaaaaataccacgaccaccacaagatatcagcataaaataattaaatcattccataacgtgaaaaagaaatcaaaagaacaaaatatatgggatattcccaacttgaagttaaacccatttccaattattgaagtcgaaacaatgttcatgaaatcacttcggtcccagttgactaagaaaaatattcaaggtaggcccagaataaaacggcttctttaccctgcttgaatattgtcaattccacggccaggaaactgaacgggaacgggagtgctattgtcgacaaaaatcaaaatccgttcagttcaacactgcagagtgtaccccgaggatattttcagatataaaaacgactacaactgctgccttgacatctcggtggtgtctcccgatccctcatgcttgtcctgttggtaatccatattgtacgtacctgtacggtgagccccgatgtgttgtgcatgaaccaaactgtgatgtgaccatccagcgaatccacatggagagtgtgtccacagacaactcacccgttgtgcaagatagcagctgccaatgccgcttactggtgccaagaaagaagcagccaataaagcagctggtggacaagacaacgtactgcgagcaacgtcgccgacgcgttgccaagctgcggacgtcagatgacttactcaaccaagtgttgccgggaagctatgaggctgtcgccgtgaagaagaagtctgtggggaaaccggttgtgagcaatgcgtctacgtctacagacaaggggacttcaaaacccaagcctcaaccagacgtagtgaaaatatctgcaaacatgtccagtagaggtacgcagcaaaagtgccaccagcctcacacaaaccgaagcaacatcaaaagggctgagacttccaagtgttgtcaaactgttgaactatgtcccgcctatagcagtgtcgacctggctcaagatgaggacagggaaaccctgcggtctgtgtattgtctgttgtccgccattgatggaagagtccgacgaatgaacaacactctgcacttacgattatagggtatatatttgtatttgtcatgtatttgcgcttttaggttcgactgttgatgtttgggtatactcgtcgtccatggtactgggttctcccacgctttgagtgtttgtggttatttaaacagagtgtccattactgatacagttgtacctaaattcggagtgtaaattttacctaagtagatttatcttgtacctaactaacgatattattattatgatttttcactggtagctctgcaatgtcctttagacaaggtaatatcaagatttttagtcctgtaatgttcatgtgtaggttttacctttattacctaaatgccggttctatattttaaattttataggaatttacacaataaaaagttttgttattgcaaaaaaaaaaaaaaaaaaaaaaaaagaa

SEQ ID NO: 654 - DNA, 1266 bp, Plutella xylostella
tcttttgaaaagcttacgaactttattttaaaattaaaataaaaatgtcgaaaaaagtaaatgtcataagatgttgtgtcattcataaaaaaggcaaggattggtgaaaaatgctaaaataaaatgaaagtaaactaaatatcttcaaatacaacttgatatggcaaaatattaaaccatactacttacataaacatagatatttttgcattacatatacttcacaatgtctgcgccaagcaagcaactcgtttcagaagacgattcaaacagcgagaatttcttcggaactgactcggcttcctcctcatcgtctgactcaggagatagcacaaataatttcgaatttagcgaaccttttgtattggaaattcatgacattaaggaaggcaatgcattaggctacacaaagtcttcagctgatgttaaaaacgggaatgtcaagagattaaaaaagaagaagaggaaaataaatgctactagtggttccaccaacactgcttcagatattgtaacaccgcagccttcaaacacagatacggctaacgaagagttttttgatgcgcatgaaagcttgcattcaatgccagaaaacaagcctaatacagttgacccgaaaaacgcacctgtggagatagacaacacacaaatgccaaaaactaaatcaatatctggacctcagaaccctcaactcgcgatcaaccctgacgcattgcaccccagcccaccgccgtacaaacaatcctcttttataaatcctcccgatgcaagaaatccaactgtgaaagaaaaggcctcagaaccagctaatccaagcatgaagaagccttcagtacctgggcttggagcacaaaggggtatcacgataacatcgattaaccctcaaactggcaacacccaaggagtagatccagctgcgaaggaccaagcgccgggaacacagcccgtgctgaagaagccatcagcagtggctggtctgaagacacaggatccgaacgcaaaccaagtacctccaccgcaaacagatgcagagaagaaaatagctagtggattggctccaccgatggcgcaatcgggacagcttccaaaaatgccagccgacgatgctctgcagcaagccgacaatgccgttaagccatccaacccgggattgaaacttccggaaaaggaaacaccgaaatgatacatttaattagtttcaattctctatagaaattcagtaattaaattgcttatacaaataaactataacaccaaccaaaaaag

SEQ ID NO: 655 - DNA, 935 bp, Plutella xylostella
tttttttctctctataaaacaagtcaatttatttactgaaacccccacaaaatcctctctacccgtccacaaccccccagacccgctccacgatccagtccatgtactggtttacgtcggtgtagacgccgggggagccctgcccgcactgcgagccccaggacacgatcccccggacggcgtacgtgcagggaaggtcttcgtcgtcgatgtaggcgagtaggggaccgccgctgtcgccatggcaagagtcgttggcttctccccgctccccgccggcacagatcatggccttggggtcccagccgcgcgtgaggccctgcgggtcgatgcggcgcgagcactcgttggccgggaactctttcacgatcgtcttcataaggtagtcagcggtgggccccgcgttgccggtctcgccccagccggccaggatcctctcatcatcagtgatggtcatctgcggcagcgccaggcacgccggacggatgaagtcggagaatataactgaggtatccagttccatgagcgcgatgtcgtagtacttctccttaggcgtgtacagcttgtgcttgtagtatctgaccacgttgtgcaggtccccctcgctggccatggacttggcgagcgcgccgagcagcgcgaagcggaccaggccataatctcgatgtgagacgacgtgagcggcggtcagtatgaacttgtcgctgatgagcgtgcctcccgccacccacttgatggagccctcgaagtccacggtgttgcggcagccgagaagcaccatatgcgggaactccttctccagcgcctccacgccgccggccaccttgttggtgaacgcggacatgacgcaggtgtcgcggcgccgccactgcccgccgctctccgacacctcgcacacgttgatgtagcgctggtattctacgcatttcagatcg

SEQ ID NO: 656 - DNA, 935 bp, Plutella xylostella
tttttttctctctataaaacaagtcaatttatttactgaaacccccacaaaatcctctctacccgtccacaaccccccagacccgctccacgatccagtccatgtattggttgacgtcggtgtagaccccgggggagccctgcccgcactgcgagccccaggacacgatcccccggacggcgtacgtgcagggaaggtcttcgtcgtcgatgtaggcgagtaggggaccgccgctgtcgccatggcaggagtcattcgcctctccccgctccccaccagcacagatcatggccttggggtcccagccgcgcgtgaggccctgcgggtcgatgcggcgcgagcactcgttggccgggaactctttcacgatcgtcttcataaggtagtcagcggtgggccccgcgttgccggtctcgccccagccggccaggatcctctcatcatcagtgatggtcatctgcggcagcgccaggcacgccggacggatgaagtcggagaatataactgaggtatccagttccatgagcgcgatgtcgtagtacttctccttaggcgtgtacagcttgtgcttgtagtatctgaccacgttgtgcaggtccccctcgctggccatggacttggcgagcgcgccgagcagcgcgaagcggaccagaccataatccctatgcgagacgacgtgcgcggcggtcagtatgaacttgtcgctgatgagcgtgcctcccgccacccacttgatggagccctcgaagtccaccgtgttgcgacagccgagtagcaccatatgagggaactccttctccagcgcctccacgccgccggccaccttgttggtgaacgcggacatgacgcaggtgtcgcggcgccgccactgcccgccgctctccgacacctcgcacacgttgatgtagcgctggtattctacgcatttcagatcg

SEQ ID NO: 657 - DNA, 649 bp, Plutella xylostella
ggaggggagatcgcttcgagtgtgattggttaagtaacggggaaggataataaatagatgatggtgagggtaagatttgtggtgaagtgtcttggatatcgaaccctggagtaggcaagcagctttgtgatccatagggggatctcgaggtgcgcaacatgtgaggctgtggccgcggcgtgagggtggactgcaaggtagacttggacgcgaaggctgacggcttccgcctgacagatggcgacaggaacatgcgcctttcattgacgagctgtgacatctggggcgtgactcctgacatagatctttgaggctgtgatgaaagtctgctctttttagggtacactttcactactcctttggggttggggcgaggagtgtagaacatggaagtagctcgtcgggagccggcgtgcggaggggatcgggagggcgatgcgtaggatctggtgacgggagctgacataggagccatagggggtgttgtagatggaggctgagttgggtaagccattatgcttggaattattgatacctctgtgggtaactactaatatctagatctgttgaaatactgctttaagcatttgtaaagttgaataatggaaataagtaggagtatggaaagtatagttgttggcaccaaaat

SEQ ID NO: 658 - DNA, 1707 bp, Plutella xylostella
ttttttttttttttttggaaactgacagctgaacgtcaagcaagaaaaagtcatgtcaatattatacgaaaaattacaatgtttatattttaggtaattttattcgtgatcgaatgaagaaccaacgaaatgttattaaaatttagtctttcccttcgaaatgctaaaactgtttttttgtttgacaacaatctatatgtgtgcacaaattatatatgctcaggctgtcccagaatacgctttcgagtatgaagaaaatcaggaagcagatagtgataatgaacccccggaagcgaaacgaaccaaacctccagtcgaaagtataccaacagaaaaagtcattattgcagaatcaactattaaagagccagttagaatgaaagaaccagagagaacagtatttacaacaaaagaaacagagcccacagagtcagctacgcaacctgaaacagaagcgacaaaagttgaaataaataatcgtaataacgaagaggctatggatattccaaagaaacctattcaaccaaggaaacctagtttcaagcctcttagaagaaaacttgaaagggaagatgaagagcgcgtagaaacaacagctgagacttggaatgagcatcgaatgagcccgatcataagttggtatcagaagcccgagcagactttagacaatttcgacgtttcgtttgaaacagtaccaacgaaacgtagaaacaccaaacctaagaggaaaaagactaagtctcctaaaactgaagcaagatacatgaatgaagatgaagaaaaaccttcttttaaagctgatgaagggatcaattgtgatgattttgcatcgtatgctttgaactgtactattgaagctgctttgttgtataattctacgcggaagtctcctccactgccttcaaagttcttcgattggtgcagggctataaggctgatgacaacctgtgcgattgactggaacaacgcatgcaagcatgtcactgaaagtcatttcagtcacgacagcgtcaaaggtcacgttcacgtcctgaataatgtttgtgacgatgaaccttttgctgcccgttacgaggacgtgtggccctgtatcgaaaacacgatattcgagtgggaggaatgctacacgaacttcaagaaggaaatcgacgaacagaagagctcttcacagtcttggacccactacgatacacatttcaagctttgttgtgcgcgagcgcagttccgcgcgtgcacgctggacatcctgttccagaagtccaagtgtacgcaggaagaggccgtcacgctgcagaagttctccgtcatcgtgtccgagggggatgtctatcaggactgcgaccaaaatgtcatgtacgacaactgccccggcggagacccgcgacccccgcgggacctgctgctcaaactcacggaaaccgaggaaacgccatcaacagactctggaaacggaaacagaaacgccatcaacctgacttcattctacactgtgctaagtgtgttttatcttgtccgattgtgttgtgctgtgtagactgtgttttgtttttgtatgcgatttttgcgttttttgttttgtgtgtttttgttaggtaatatattttgaaagttttgggtgtgttttatttcatgggtttcgtgtcatttaggatgggggtgtagctataagacctggttcagaaggggcgaattcgcccctccagaacc

SEQ ID NO: 659 - DNA, 790 bp, Plutella xylostella
ttttaatgatacggcgaccaccgagatctacaccctatcctacactctttccctacacgacgctcttccgatctcccgaccacatcgacgtcactatctccatcaggttgaatagggatatcattttacccaattcatcgcttgtgactaatttagatgagatcgatcgtaaagctgtgaaggaggacgcattaaatgtttccacggcaacagctaagtagaattcatatccgtttttggccagggctgataaaatagcgcccacaaaatgactgcagttggatattagaccaagaaccgagtcgtcccatttcaacatgcgactaaagaaacttattgatattaatgcacccagtgcatgaacgcacacgtaaaaagtattgaagaagctatacttaacagcgtcccactgaaagcgatatcttgtaaacaaatatcgtactgtaaactcgccataagacggcccataaataaaggcaatggccgtgaacactaggatggcttttgtgcgccggcgattgggtccctttttgaatgtcacttgaaaagtatcccttacatgttttacatcaaaaaatgtcttcagaaaattccacattccggttttttccacgtttttcttattgcccggtctttgaggatcctgtatatagaagtatccgtacactatactgaagaagtagagcaagccactgagtgtgaacacgccgtagtagcccaggtgtttgagcaacaccccgctgagggcggagccgatgggcgtgcccgcggtcaggcacaggttggcgat

SEQ ID NO: 660 - DNA, 1982 bp, Plutella xylostella
gacctgtcattattcttgtcaaaccattttgatagacgtgtttagaagcaaaaaccgaaaagaaaatttaattatccaccattctatacaacaactttatgcaacactttttaggtattttcaaggcacagcgaaacggagttgagtaaatgttctgtatgacaaagtgaggatagatgaaagtgtttgtgtgtttgttgctgacagttgtgtcagtgtggggtttcccagagctgagaagtgaggggagtcaaccgctgcagctaagcgctagaacgctgcagacgttggagccattgaaacaaaagccagtgcagagagactgcaacaaggggaagtgtgcgtcttcaatagcgcagaaagcggctgctgaagcgaaggcagcgcaagcagcacaaaacgcggctggggcacaggctgctcatatggttaaaacccaactagcagagaaggcattgcaggctgcaaaggcagcagaagcagctttggctggcaagcaggccgtcgtcgagcaactacagcaagaagtgaaggaggcagaggcggtcgttaacgaaaactctcagtcgtcccattctcaagaagcaaccatcagcgcagcggtggtcgcggcccagcaggcgacggcactcgtaagttgctacatacgtacgttagataatcctgaaccgaagtgtgatgcgtccatgtatgatgctttcaaaacatatgatttgccgtgaactgaaattggtcattgattgttagtggcagcagtcaaaagttatagatttttcgaatttatttcaattttataggatctatgtaaaggcaatttttattcagtaatgatgactcggttacacgataacaaagaaccaaaactaatgacactaactgtaaaattgtttgttctatcatgaaatcctctattaggtgcagagcttttaaaactttgttcacattctagactttaaatcttggtttaccgctaggttgatcttcctgaaatttatgatagaatcttgatgaccattcgtcaaaatgtagtccgtagtttgtatgtcttcaacaattcctaccagaccaaaagttgaaatcaagttttacgaagttgtaacgaaaactaatgctcaattgtacagggggattcggttgacggttactgccacatttttgaatgcgccgttgaacgtttaaaatttttggtagtaattgttgaagatgacccttgtgctgagtgagggtgattcgtaaaacttgattttctcttttccaaaaggtctgagcggaaatcggagagacggccaaccgggtgaagaaaaaaattacgtaaatctggagcaatgttgctatgtgtctctgtaggggcactactgaccatttcttcagtgttggcctgcataccaatcatgtacaataattggagttgtttatgtaaacataaaggaaagtagtatagtatggtggatgtagtgtaaaatttaaatttttgtaccgtctttttaataaatctcagtttagaaataattgtcttttccgtgaaaggtgcaaacactgtaattataatttttatgatggttttaatttgacctttggccctttttataatgatcagtgtaaagttgaaagggaaatattgatacgttttatgcgaagtgagtatataatgagtatgtataaacgcgttgaaagagttatgcaactgcaaataaatttatgattgatgtacctaagatagcctttagcgtagaaatgtaaataattttatcgaaaattatagcttacccatactcatcttcatgaagcaaaattacgttgtctttagttttgtataattgtgacgtcaacattaaaatttagctaaatatttgttctttacaaatataatgtaggtactctaatattgtattgtaatactgttatatctttatatgatatatttctaagagtgctgtaaattttcatgtttttttaaataaacaacataaagtacaaaaaaa

SEQ ID NO: 661 - DNA, 1451 bp, Plutella xylostella
gggtgccgtgcccgtgggccgcgccgcctccgcgcccgccaccgctgccgccgtgcgcgccgcacgggtcaacgctaaatcgtccaacaagaagctgcagaaggtggaactagacatcagtccgcgcggcgtcgtggtgacggacgccgacacccacgataatgtgctcagcgtctccatctaccggatctcgttctgctcagcggacgcggccaacgcgcgggtgttcgcggtggtggaggggggcgcgcggggggacagccacaccgcccatgtgttcgtttgcagccgccgccgctacgcgcgtgcgcttgcgctggcgttggcgcatgccttcaatgatgcttatcagtcttggcaggcaagtcaggcgagctccctatctggctccaagcgcctagcaccctgggttcgattccccgacgacgacgacgaggaggctgacgaagcggccgacacggagcagtggcaggggctcgcgccgctcgtcacattcgcataataatgatgtatacttactttaagattaagatatactaagtaacccggagtagtaggcagagatgaagaggtcctctgaatgttacgtagcagccattttaagttaagttaagtataaaacttatgaacgttccgctctttcttaggtatttttagattgcattcgataggtttcagagttagactatgtagattttttacgttctgttcataattattatacatagctatttaggtacctatactgttttcatttaggtacttactttgttcaggattccgtacataaaatttatgaaagcaggaaagtcacctaactttgtcgatttagaaaatgccatagttataaattgcaatttcaatgagggaattattgcttctaattaaaatatttttcgaaaacatacaatgcatagttaagtataaatgtaaagtttattgaggctaataattcatttacccttaaggtataatctctctctctatgttaagtataatagatgtaagtggataggtgtgattatgaattaagttaattttaagtcatgataatgtaatgaatttatcaagtgccatttttatataaaaaataaataattgactgatttgaaaagttggttcacgggtgataattaggtatataaaattaaaaaaataacgttaattaaaacggtgctataaaatttaaaaattaataaacagtaaatttaaggtataaaaggtgttaagttttttaacattaaactgcttgggtattcaaaaactagatttttatggaatggtgataatttacttctttatcactaattaagcgtagtaacctaagtagtacaagtaagttggtgaataatttgtttttttgcagaatatcaagcaaatgaaacattaagtaactaagtactggatgacttaattaggtatcttataattagatactgttgcaacacaac

SEQ ID NO: 662 - DNA, 1407 bp, Plutella xylostella
gggtgccgtgcccgtgggccgcgccgcctccgcgcccgccaccgctgccgccgtgcgcgccgcacgggtcaacgctaaatcgtccaacaagaagctgcagaaggtggaactagacatcagtccgcgcggcgtcgtggtgacggacgccgacacccacgataatgtgctcagcgtctccatctaccggatctcgttctgctcagcggacgcggccaacgcgcgggtgttcgcggtggtggaggggggcgcgcggggggacagccacaccgcccatgtgttcgtttgcagccgccgccgctacgcgcgtgcgcttgcgctggcgttggcgcatgcgtttaatgatgcttatcagtcttggcaagcaagtcaggcgagctccctatctggctccaagcgcctagcaccctgggttcgattccccgacgatgacgacgaagaagcagacgaggcggccgacacggagcagtggcaggggctcgcgccgctcgtcaccttcgcatagttatactaaatactttaagattaagatataataagtaacccagcgtagtaggcagaggcgaagatgtgctctgaaagttacgtagcagccattttaagttaagttaagtataaaacttattaacgtttcactctttcttaggtcttttcagattgcattcgatagatttcagagttagactatgtagattttttacgttctgttcataattattatacatagctatttaggtacctatactgttttcatgtactttattcaggcgtctgtacctaaaatgagtcaaagcaggaaagtcagctaactttctcgatttagaaaatgttataagtaattataaagagattattgctttcaattaaaatatttatcgaaaacataaaatgcatacctaggtataaatctaaagtttattgaggctaataattaatttaccctaggtaaaggcataatctatctatatccatggataatagatgtaagtggataggtgccattatgtattaagttaattttaagtcatcataaaatgtaatgaatttattgagtgccattttattaaataattgaatgatttgaaaagttggttcacaggtgataaatacgtacaaaacgcaacggtgctataaaattcaaaaaataatacttaaacagtaagtttaagaatacgtggaatagctgttaaaaagttaacattaaactgcttgggtaggtattacaaaatacgttttttatggaatggtgaaaatttgcttctatcactatttaagcaagtaggaacctagtacaagtaagttggtgtataatttgttttttgcagaatatcaagcaaatgaaacattaagtaactaagtactggatgacttaattaggtatcttataattagatactgttgcaacacaac

SEQ ID NO: 663 - DNA, 1905 bp, Plutella xylostella
gtccaagcggcggccttggcctgcatctgtgctgcctcgcggagtggtgcaggcggcggcggcggcggcggcagcccgggaggctcagtgcctcagtgcgcgcccggcgccggacctcgcaccacactcctggcactcctcgcctcgcagcccggaccggtcctacatgtaatcgctgttttttaatcacctattactaattatgctgtgtgctaagtgggtaaaaaagtgtggttttccagtacctcctaaggatgtcttataagatggtgcttttagaaaaattttggacttaaagcttgtttctacatatatgatagtaatgcaatgtgtgaaataaaaagggcggtaatgacaaattgttaatgttcactaactacggcacacttcctataaacacggattacttattgatagtatctcaataaaaggtatgttaccagtgcacatttaatttagttcttgtcgtttgatccgctgtcggcctatatgtattaaaaaccggcatattaaaatatacgcctactcatgtgttgagtgcctagtgtgaagaaatagaatgatgtaactggtagcattgcagttgaatgcatctaccacggcaccgcacctacccacagcgaaaggtattcagtatcgcaagtcgtttgagcccaagaaaatgcaatattaatctatccaaagcaccttttcttgcgtgataaccatacggatacggaattaattgttaactaattgcaacctaaacatagatccgtagttgaaaaaaaggtgaatgtgttaagtgtaatataaaaaatactcgtaactaacccatctaaatcagccactatctctagtatttcttatttaaattatagtgcctacctttaggtacctttatacagggtgttacagaagtgcaacgaggtgactcagtgagggggttccacttaataacttttgttctacgagttttggaatttcacacccttttttggaccaattgtactgaaaagttacgacaccaaacagctcacaacagcctggtacaggtataataaattaactatttaggtattctaggtaagctgatttgttgtcatggccatcgatggcaagatagtaagctgcaacggatatgggtatatattaacgctatagtggagtggagttgttatcaaaaaggaggagcacaactcgtcatacttaacaacattttacttaagttcctatgaaatttacttactctaatgaaaacatagaatagctgcttatattatagttccgatgaaataggggtgagctagataaatgtagatatccgacgcgaccggggatggggcaggttaagagcagggtggcaatcatttttatcacgatattttatgttttcagcaagttaacgacacaaaaagcgcatacaaccagattaccgaattagtgaacaatcagttcacggacgataatgttgtcccgacagaagcagaccccaataacaatggaactacggagactccgaagatatcccgggcagaattcctgcggatacttgatcgaaatctgaagggtttggcgcgtctgcggaacctggagtggcgagaagcaaagaaggactcctgggagaatttgcagagatacaaagaagaaatattcaacgggaaaaaaactggaaaacgaagatagcattaaattaaattcattttaactacttcacataacttatttatttgtgtaacataaatatttaatgtaaaggaacctcaaggacggtgacacagtgggtatcttacccgataagttttacatttatctacctacctatatgtacttaaaaaaatctaagtaggtttgtaatgattggctgccatcgttcataaggtaccttttctcgtaaactgttacatttaaattaaagattgtttt

SEQ ID NO: 664 - DNA, 4374 bp, Plutella xylostella
catttgctgtaaaaaaaataaaacaatggattttaaaacagttgcccaagagttgactgatcgacttgtaacctctcaaagattcataaactattctactaaatatgtttaccaaacaagtaatgcttcattgtttgaacctacggaacctatgccagctaagaaagatagaatattaacagaagtaaataaatattttaatgagcttgaaattgaagccgacgatgaaagcatagaagcaatagtttcaattttatacacacaacaaaatcgactttttgctcaagaagtagatacggaactaaaggaagcattacaaaatatcggtatttccgaagagataattcctgaatacgtgcaaaaatttactgatatcgtcagaactttagcagatgagcctagtgccgatgtgactgtatcagaagatatcgaagacgaaggtactaataaaaagtatataagatgtaattatggaattacgcgcaacttaacagattgtttacagaaatacttgaacatgtatgcccaaagtgataaatttacgaaagatgcagtcacaaaacgtatggtcactgaatttgagaagctagaatatgatgagtccagtgtcgatgatgaaagaattacaaccatcacttttcagagaaaacttgatattgtacgggaagtatcggaatggctaagaactataccgctagaaacaacatttaatgcaccgaccaattataacagagcagttttagtgactgaaatggctgaagatatttttgatgttttggaatcatttagcactgatgaacttaacgatctcataaacttatggatgcccgaacttccagtcttgcaaactcacacagaacaattggatacgatgcgaacgtctctaatatttagattggaaaatttgaaacgaagtgcaaggacaaggcatgccatagttcctgaggtagcagatggaaaatcggacgtggaattattccaagattttgttgagccttatgttgtcgtaaaacaagctctgggggatgacgtagcaactcaggcagcaatgatccatcaactagcacatgcactcaaagacgtaagagactttcagctggcgagaagactaatgaaagtctctgaaaggaaccagtcagtgagaaggttttcaatggaattagaatttattaaacatataagcgagtggctaaaacatattcctacaaaagaaattgtcaacgaagctgaaagaaaggagagaatgactctgataagtaatctggcagaatatctcgggaaagccaaagacagcaacttggatcacccaattccagaagctgaaattacaaaacatgtttcaatatttcttgacaaagttctggtccctacggttggcaaagacaattacgtgtcatacatatcagacctaaaaggtcgagttaagtggcatgaaaatccagcgactgaacctcaaggatttccttcacagagtggagttcctcaacaggacagaagtgcagaattaaggaagcattacattggtaatgatactgattatggaaccttctcagaaaatgtccccaaatcgtcgtcacaagaagaaatggcactgcctcttccggaggaagtacaattacatggcagttcatcaaaatcccaaagtctcggaagtcaaaactcaggaagaaaccaaacgcttgttggccaaccgtcaggtcaggacccatcagctccccgtgacgaaaacaatgcatctaacgcacaacggtatcaccccccttcattcccgagagatattcagcagccagaacataatttatcttcccaaaattatcgaccgtatctatcagtgcccattgcaaccccaaaaggtattcatcagcaagaacaccataattattctgaacggccaatgccgactggctatccttcatataggccgccttctgttcgaatgtcacctaatcagtttaatgctccaaatgattctatagtaccaagtgcagattttgacccatatacacaaaatgataggcagcgtaccaatgtatctgaaggctcagcaaggccgaggacagattatggacagacccctccttgcacatccccgtgtgcagatttatattcagcttcaaatgcacctagaagaaatgactcacatatttcacatggtcctcggagtatagcaggtagctctattggaccccatacaacgtccttatttgaggatcaacaaaaaaattgcgtcgaccttttatacgatgtcatcgaagaatggtgtcaaggcctccctctcgaagaagcgacaaggcaagatgagattagaaactcggatttgaaagcgcaaatggagctcagactcgttttacaaatcagtgagatcaacagagatgacaacatctttaacaatccaaacacgtacgatgaaaggttagattacattatcactgagttgctaaatgctgtacctccaaatccaaggttagaaactctgaaaccagcattgaaagatgatttgaaacagtcaatacttagactcaggcctgaaattcaaaaaggtcgtgaccgatatcgttttaaggagcaacttcgtatgactgtagagagggcaacgcaaagaacttttgaactatcttctgaaatgagagcacaaatggatgtgatatgtgaagaaatcatcgatgatttcatagaatacacttacgctaataacaaggcgaggctgaaaagtaaagccatgcagacgatagagaaagcattatctcatacaaactctccgcatgagcatgccaagcgactatttgcagcattgtcacaaataaacgcaccaatttacgaatccatctattgcgaaattggcgagataaggatgaaaagggaaatagctatatggttgaagcgaattccccagatagactcaaatcatgttcagacgaccattagacagaagataaagagtgcgcttgcaaaaaaactgtacggattagaatcgactcaaacaaccgaaaacaacatgagaccagcaatctataaggctttgaagaaaatgggcgtagagcaagacaacgaccaattggtcgaagagctgttagtgagactgcggaactctaaaacacaaagatatcagcaagacccaatcattgttgacgaagtacccagctatgcgagctcgttcgataggaatctaccacaatcagaccctccgataatagaaccaagagtacagagtcctcaaaaccaacaccaaagagctgcttcagcattgggtctggagctgctgcaaaataccctaaaccctggaattccactagctacaataccacagtcatcgggtatccatagtaccctaaaccctgggatgccactagctccaataccccagtcatcgggtctacatagtaccctgaaccctggattgccattagctccaatacccgagtcatcgggtctacatagtacccaataccctggaatgccaatagctccgatagcacagtcggcaagaaagacatggcaacgtcaaacaccggccatagcaccaggagtagcgctagatccgactggatgtggtggcatttgccagacgagccaagcgacctcagcgaggactcccgcagtaccgatcatccaaactatgcctataccagctcccatttctgctcccatctaccgggaaaaccccacaaaccctgcaaatatgccgccagctatttctgctcctatcttccgagaaaaccccagatctcctgcaaatattccacctccatccataacagtgacgtctcccagcctgcctccccaattgaggactcagagccgatctagacagcttccaagactagacgttccacctgacaggctagctacgaaccctgagaacataaatgtcgaccatgagtatgttgtccaagatggttttggcttttcaacgccgaacgataggggtattccggcaagacaggtgggcgctccaaggaaacctccagcgaagtacgatagacctacgaagcggactaaactgaataaggatacggagaaggtaaagcatccttgtaggtgcccgaaggatgatgacagaagacctatgccatgtgattaccacatgcctggtctgtatatgccgccaccgatgccaccaccgatgccaccttatggaatatattattattattagagtgtgttgtgtaaattaatgaatctatggatgattgatgtgtttcttagattaacgatataccaacaagatggtacaaggtgtatcacatacatacagaaagcaagaaactatctgcattttgtttgctgtcacaccgttttaagttcaaccttatatgacaaccgtcacaaaataatattctaaccgaactaattcaaaataagagcccagttgta

SEQ ID NO: 665 - DNA, 633 bp, Plutella xylostella
aacttatccaaaaacggcattgttttcctggcactctcaagtagggtaaacgtataaattaacttaagtaaaactcaataaattctgaaaaaatgaagctgtttacagtactcactttgtttgtgattggctgtgttttgtttgaggccgtgcaatgccttccaacatcggacggtcgaaaccaacaggaggtgcaggtgaagagaccacaagattaccctaagaaaggatgtcaatcgccaagtggacagggaagtggaggacagcagcgaagcacagatgaaacaggtccacatcaacaagaatgtaaaacgtcaacaggccagaacacggggcgtgatccgcgtgatgataatagttcacaagaaatgccatcatcagtggaaggccagaacacgcggggtaatgataataggccataagacacgccatctcaaaggaaggtaacaagtgaagtcttaagtgaattaacggtgcgttgccatgacatgccgggcaagtcgcaacagacatcttttatcattacttaactaagtttttttaaatcacttagggtgaattcgtccaaacatcacgttacacgagaataactataccggaattaaaattatacgcgagtaaatatctaggacg

SEQ ID NO: 666 - DNA, 627 bp, Plutella xylostella
aacttatccaaaaacggcattgttttcctggcactctcaagtagggtaaacgtataaattaacttaagtaaaactcaataaattctgaaaaaatgaagctgtttacagtactcactttgtttgtgattggctgtgttttgtttgaggccgtgcaatgccttccaacatcggacggtcgaaaccaacaggaggtgcaggtgaagagaccacaagattaccctaagaaaggatgtcaatcgccaagtggacagggaagtggaggacagcagcgaagcacagatgaaacaggtccacatcaacaagaatgtaaaatttcaacaggccagaacacgggggggcgtgatgataatagttcacaagaaatgccatcatcagtggaaggccagaacacgcggggtaatgataataggccataagacacgccatctcaaaggaaggtaacaagtgaagtcttaagtgaattaacggtgcgttgccatgacatgccgggcaagtcgcaacagacatcttttatcattacttaactaagtttttttaaatcacttagggtgaattcgtccaaacatcacgttacacgagaataactataccggaattaaaattatacgcgagtaaatatctaggacg

SEQ ID NO: 667 - DNA, 728 bp, Plutella xylostella
cctcaacggtatatagcaactacctcgtgtttaggcttgaatgattcgtattgattagtaggactttttggtatcatttacatcttacttttgattaaaaattattgcaaataaactaaaaactataaaataaaataataattaaaaagaagaagtcagtttttttttaaattattattattatcccaccatcgtctttgctttcttcttattttccttttttctttctcttgctttaatttatataataaaaatatgtcaacccgaaagtaatagctcgccgtccgccgtgtttgccggttcggaatgttatgagcgttcgccgagcatgtggatggctgtttgtgttcggtgattgtggttggtgtttgtgactttgtttgctgtttgccgtgtttgtgacaaacaacaagcgtgtggatggggctttacactttattcatcttatttctttagtgaaatctttaaaaaaaacctcataataatataatgtggtaacgtaaaattgagcggtagtcatagtcgtgtctactaatgaaacctacatattttccatattctaattggtgttatctactgtgtcgatgtcgtctaaaatgtaaatcatatccaaatgttacttggtgtcgtgaaatagctaagggctgatttttcaatagtcagataaatgttttctgaggcataaaatagttccggtcactgtctcatacattctgacgcgacagcat

SEQ ID NO: 668 - DNA, 1522 bp, Plutella xylostella
ttttttttttttttttggttgactatttcacgtggtattattgggtattatttattttcttttatttgtgagtttgacacgtaactttacaaaacgtaaattacagaggcttcatttagaataacctacggattacttattacaaaccatatttgtcgtgactagtcacaatggaggaggcccaagagcatttcgaagaaagcttagacaagtttctgaagagaagatatcaacacgtaagaataccagtaataccacccaaatctaagtatttacaaatgtgtgcgagggttttaaggggaaaagcaaagactaaaaccattgaattaagtcccagtgattatttgtttctgagaaaatatgatgtggcgcttagagacggtcaggagagacttgtagaagctgttttaccacaaccgatggcgatacaaccacgtgtgggaaagatatacctctacaaagaagaaatatttgatacattacataaggcacatattgaaactggtcatgggaatgctgatgatgttatgaggcatttaaaaccctaccaaaatgttactattgatatggttaatatgtttttaaagtattgcaaggtatgtactgaaaatacctggaaggaagaactcccaatcaaggaaaacaatgtctgccaaattggtttaattgacatgcacgagcacccagatcgccaatacaaacacatatttgtgtttagagacaacagcaccaaatttattttactttaccctctagtttggacatcaactgagatcgttgcaaaagtgctcttagacatatttacaatttttggagctcccagtgaactgatgtgtgataatatggaattgacaggtaacaccattcaagagctcagtggattatggccagagttgaaggatatttcacttaaatttcaaaagctagatgaacaacttttagatgtaaaagattccctgatatcttggattaaagacaaaaagtcatcaaagtggtcagaaggtcttcgtcaattgcagctaaggatgaatggaaccaatcattcagatctgagctgcagcccatacgaagccatgtttggaaggaaactgaatgttgacaatggggaaaagaaatctacagtagaagcagtatgttctcagaaagatgactttaagaagaacattgaatgtaataataataataatttaatgtaagcttaaataattattcattgctataacttaaaatattgtaggtagatattgaatattgtagaccttatggagcaaattgtgataatttatccaactttgtcagcaaaatgatctcaattataataaaatttatttttagtatgttacattgaagaagacataataatttagtttactattaattaagtacctaatgtgaaaatatgtcaaagattttttatttaaaataaatttgtagcagttaagagtaggcacttacataatttacctacctaagttcgtcgacaaatgtttaagtattaaaattataattataacgaacaagg

SEQ ID NO: 669 - DNA, 3600 bp, Plutella xylostella
ttttttctttgaatgtgttgatgtgttgttgatcacagttgatcacatctgtttttaaattttgcatgttttaaaattcaaagttattatgttttgaacgtaaaaattcatttcgtatcgtatgcaaattaaattaaagtgtaacctcctaccatacaaaataatcttcaaaattttccaataagtaattcgacaacaaactcccagactcctcaacaaaatgcctcaagtaccgccatgcctcagccgccgctacgaggctatggaccaactggtctccgagctgaccggctccgcagtagacacctccggggagcctaccgatgtcatccaggacccggccatacggctcatgtgtgacctgtggcttgttatgaaggagaaccctgatattgatgtcgtggaagcactacagaaatgcaaacaggaagctgccaagaagtgccccggtagacagaggcccgtgtccctctacccgtgtgctgccaaccccgcgtgcgacttgcagggccagaggaatccagccgagggactcggtagggggaggatatgctcaggaaagttggcgtgtcgtcgattcaatcaaccagataaaagggaagacctcacttctgaccagggtgacagtcaggacagagtggctccgatcagcaaagtactcaataatttaaatgccgtaacagaaatgaacaaaaagtttcaagagcaattggaagatgtagagcagacagagaaacaactagaggacaagatgaagcagctagaggataaggaaagggaaggcctggaattgttgaaggaagccgattgtatgtggaactgcatggagtcagcttaccagcagaaactgaaagagagcgaggataaacagagtcagttgatagatgaggttcataaaattgaaaaaacaatatccaaatggcgcagaggatacagagatttagaattacaaatgaaaaaagttggcaaggttgaaaaagaaattgaagaaaaaaaactaaaaagagaaaatgatataaactgtcttaatctcgaaatagaaaatctcaaaaagcaaataaaaaaagatgatacagctatagaagcatcaaaaaaggcatttgaaagcaaaaagaaggcttgtgatgaaaaagtatcaacgtttactaaaaaaactgcagctttagaaaaagaattagctgaggaaataaggaatagaaaacaagctgatattgaaggccagaaagaaataaaagcagcacgagatgaacttaataatttgtccaagaaattacttgaaaagaagcttgctaatcaagatattctagctgagtatggggcgcttatgaaggatgtagagctactaaaagagaacaaagaactttgcaagcagcgttgcaaaagcaaatctgaagctatcgataaggagctccaagaaatcgaggaagagatggcgaatttcaccatacaatgcagtcgatgtcatcaaactaccgatactgatgatgttaggaaattctgtacagattgtccaagatgtcttaaagaaagatcgtgctatgttgaacagggggtttgctgccccgattctggaagtgactgtgtgtgcatgagtgtaaaagaaaagttcatcggaaacgtttttgaaaacatgtgttcatacctagaagccaaatcaaaaagtgcttcaagccaaaacgtagctgatacggttttagattgtctgaaatcaagtttgaatggaaaactaaataatgaaactaaagctttgttaaaagattttattatgtcttcgttgaagaagaatttgaatagtattataattggtggagccgtgaaaactagatgtgagatggatttagagacctataatcaattaatgctgtgtttgaagcaaatcaatgtttcgccggcttcaaaagaggataagggacaatctaaactggcgccatgtccgcgctggggcggcaccagtgagtgtcagtgcaagaaatcaggcaaattgtccggttgcccgtgcgccaagaaagcaccaccaccaacgtttgcgccttgtcctccgactaaagggcaaacctgcaagaacacaaagaagatagtctgtgatacgacgtgctgtatagacgaaggtgaagatgatgagcctgaaccttcgtgcgataacaagaaatgttctacctccttcaaacacaccatgagagctgcacaatgctctctggatatagatgctctgccagtagaccccattgcggatagtttaaatcaagctgagaaagaggaccagaccaattattgtttttcgcccttggaggtggaacaccagcttcaaggagacacgttacatttgataaaagatgtaatgaaagcaactaatactgaaatatcaacaatcgataaaactttaccaagcgatgcaggaactaaatcgtacgcaacaaaatttgcccttatggattcaagaggaacagccacagatttttctgcagagtcaacaaatcttaatgtttctttggataaatatgtaaatgcaccttctgtaattggatcagaaacattgctatctgtgacagcagatttgaaaaattatgatgttgtggcgatagcaccaatagctgaagaacgcaacgatacagaaaacaacatttctgtgaaaggtaacaccgaagataatgatcatagaatggatcctaagtttctcccagagcagttttccaataacgaaattgtaggatatggtccaggaaaatctagccttaaggaaatatttcatataacgaaagatccttttgattcaaagcagatatctgaatctgtcaagagcattgatacaccaattccatcaaaacaaacagcgagtgacatgtctcaagatgtaaaacaaaataatgtgctgaaaataagtgtgcatcctactccatataacaagaaaaaattgtcaaccattgataattttcatctaactaatcaccctacagttttaagaacaacgccatctagaaattacttaataatattggataaagaatttgaaaaagaaagcagtcaattaattgcagactttattggtgaagaaaataaacgtgtggttgaaatagtagatgtgaaagaatctgagatctgcttgatactaaaagatgacgatgatgatgtttcgaatgtatcgattaatgatgttaataaggctttacttgtgataactgcttgtggaaatataaagttatcagtccacgcacgtcgcccaacatatgaattagatgaaaaatcttcaagacaaaaatataacatgcgatcacctgtttttaaggaagtgttaaatcaatacgtacaggattctaaatctatagaagaaatatctgacatagatttgcaattactcaataatggagtacaaaggctgggatcagaaaggtcccgttcaacgtttgttggagatcacccagatttagttaccatatttatgaaagaaaaaaaatactaagcgctcattttcgacattaataagtagactttcagaagaagttattgacatgaaacattccactcatttgcttgatagtaatcagtctccaaaagatgaggcagtttcgactatgtgtgataaaacctgtaatagtgccaatg

SEQ ID NO: 670 - DNA, 1562 bp, Plutella xylostella
ttttggcatctatagctgatggcaagaaacataaggtatcttggtctcaaggccccactacgcatccgcggacgtgtagtggcgccagatgctggtgaaacttagaagaaggaaatacgtttttcgcttttgtaagtttgtatacctttttacttttaaatacccattcttccgtcacttgcttgtcacaagaacatgacatttcgttgctgtgctgtgtactgtcattcttctagataaaagataaaataataccacaatattataatcatattataatcaacaatcaacaataatacattttatgtcctaatgacttgttaattttgtttctcatacgcatcaagatgaataccgaacctaatgtgtgaaacctaaataaaaacaccgtaaaaatgcagtttacattattttttctccgtgaataaaacaaaacttaatggacccacaaaagaaattccaacaagaagccaaatactatgtttaaaaaagaaataatattctttacctaaacggcgaacttacaaacaggacacaaacaaaacaattcattaccaaactaatattaagagacgctgcctctcaccttgatggacccgcattcggcttcgaacaatcaggacccgagcgtaaggaatcagaaccaatcattacttctgcggcggataataaagatggtaacggcgctgatgtttgattaaaaacttaaaccaattccatagtacactagcaccaaatccacattagtacttaatataaatttaaaaaatacaaaatcatttacactaaaaatggtgactttatcgaagttaacgaataaactgacaatgaaaagatctcttcacaagtcaaaattaaaagaagctgtgaaacaagcaatgctagctcagagcgatattccaaaaaagactagtgggttggattttaccaatttcaaacgaggcatggaaaaggtgactcagaaattagcaatgaagagcagcagaagtgggataaacgttgaggtggcaaaggaagcaaaagttgtggcatacttaccatgccatgaatgtggcaaattcaaggctaaaaagtacgacgaaaccacatggactcatgagaataaagggatcgagtgcgttttgagtttgtctcaagtttctccagatgagcctttcttgctttacatagagtcatctccgcaaggaccaaacttcaaaccacatttcatgttggcaggaaagtacaaagagtttgagcgaccaaccataaagatagaaaaaccaccaccgaaacctaagccagagatgattagcacaatttcggaaccactgttcaaggatccaaaggagtcaatgccaacgccaacgtttgttgacaagacattgagtccatttaacttccagaaagttgtgtatgctaaacagtatgagttctgatgtccgtctgttctgttttctcccgtcttctatcaaaaatattgtaagtaatagttattcagtttgtaataggttcaaactttactgttagtaatatagttcaaaatacgataacaataaaccattttgtaaaattcaaaaaaa

SEQ ID NO: 671 - DNA, 604 bp, Plutella xylostella
aatgatacggcgaccaccgagatctacacatagaggcacactctttccctacacgacgctcttccgatctgttccgagagaggggttatgagcgtgtccattagtacgcttataaaggtcttcatcctggtctcgatggctctgtgccggagacacacccttgtcagtgccgtgcctatgtccttggtcgctcctcgagcattcgtagcggcgtcggctatcttctggaaagcgtccagaaacgtcgcgatcgccacaagcgccgattttaacgccgaatgtagttttgtcgctttcgatatgaactcttcccatatcggtgcactgttcttcatatctgagacgatctgctggtacaggctccatagcggcgagcaatccttctcggttgttccctccattgtcacagaaacaccagaaaacaataaacacaagatcaaacactatcgcgggtcacgctcgcttcggtacgccacaaatgttgcattttcgatgccaaattgtttcgcgattaccttacatttcactgcacgtttaattttgaatcactaaaacgataaaaagcacgatttatctacaaatcaatatttataaacagatcgga

SEQ ID NO: 672 - DNA, 703 bp, Plutella xylostella
tctttttaacctacataaacgtgtctccatcagttgtgaagaaaaaatctatgagccgacaacaacatcggtttgataatattgatttataaacttttattattattcaaggaatttatagccaatattacaagatgatttgtcccgaaggacatcatattcagaatgaagttcatataaaggaagaagatgatgtagctgagccaacgctacaaacacaaaataaaaaacagcctataaatggcgatgttcccacaggaagtactgaactcgctagcttcagaggtcctaagacttggaagaagtccataacaaacttcttcaagaatccgtctcgttccagatcaaatgacggggatcgtcctaccggcagcaaggaaacatatgaagaaaaagacatgactccagaacaaaaatggcagtcgcttggaaagatatttcgacgccaaagtttcgccgatcacaacctaggggagagttcatcacatcaaagcaaacgcgtcgcagttagaaaagtcctatcatcctattttggaaaaaaaccgaagtcgatccctcaagctcagctgcctgaaaatccttgatagattatccatatcttgtagtagaatatttagttattatctagagtctagctagacctaccagatttatacttcttctacaaaataaataaatagaaatgcctttaaaaacaaaacaa

SEQ ID NO: 673 - DNA, 2609 bp, Plutella xylostella
cgtggcttatttaataataatcaacgacaactgaataaaattaaataagccgcgtcaagacgaaactgtcacggaaaaatgaaaaaatataaacagattgtcaaaaaatatctttgactaaaaattcaaatcttgaagtgaacatcaaaattattgcgtgataatatgttgccggagtgataggaggaaattttcgtgaggaatatgagggtgtctgggcctgtggcatgatgctgggggcggaggcacctcgccctgacagctatgtggacctgggctaccaatacccaaggcctaagcataaatctggagccctatccccccatggaacccccactaccctttgtgctctagtcttcttgcccctcgtctgtgctatgttattgtcgtgccagatttctaacagtctgatgtccgaaatggtgctgaagatttgtgacgtttccgagtgttattggatcttcgtggcatctgttgtcacgtatattcttgtcgctgcagtgtcgatatgctattttgttgctaaagaagaagtgaaacagatgccaatgataaagccaattgagtggaacttgaattataaaataaatacatttccaatttcatcatggaccaacacgggcatatatgttggtatatgtgagctgcataaaaacaccatggatattattgcgtcttcggtaaagaaagctgtcaaccttatacattctgactcgttgtctgatcataggagggatcaaaataactccagtgaaaagaaatcgtcacgaccacccagcatagtcctgtcttcgtctagtaaaagaaggacaagaaaaagtgaaacatatacacataaaaatattttaaaaacagatgatttctacgtatatagtatgatggtaaatacaatgcatcgtaagcacacacggaaaaagaaaaagtgtaataaacaaattaaattaacaaaatgtatcagtgattctagttcagagtcaagtccaagaaaagaaaccagtagttacgatgtggataatagccaaagaagtaattcttccactatagagtcaagtgaaactaaaagtttaagcgacggtacgtctaacgtaacaggcaaaataagcaaagaattatcgaattcaaccctattatggggttccatctgtagacgtcctggcattttcgaatccagctctgaatcaaaactagatacactaaattcatcgagctctattataagcttaggaaacagaaaaactaagaaaaagaagaaacacaaacggttttcttcgtcggaatcttttgacactgtgagttttgaagaagaaatgtcttacgaatccattttcagctcaggcagctacgcgtctaccgatcctggtacaatgcaagaagagtctgaaccagacacttcttctgaatatgatactgcaaatgaaaccaatacattggaaatatacacatcacagacatcagtaaacgaaaaaaatgattctgatgatacaccagaagaaagctcaacaccaaacacagaagtagagagttcagaaatacgatcgagcagcagctttgatttaacaaacacctgttcttcaacggtatcttccacagatagtcaaaaaagaagtttttttagattcgataaaagattttcatttccttggcaaagaaacaaaaaagaagatgctatttatagtactcacatcaaaaaatctaaatttaaatatggtactggaaaaagtaagagaaataagcaagtggaatcgtccacggttgaagaggaaactgaagaaacagtgagtattgagagtaaaagttccgtagatacactaatacaatcaacatcttcgaatgatactataacagaagagtgtaactggaccaaaggtttgaaatacgataaaaggataaccactctttggcacagaaggtataaaagtggggaaagagtagctaagagtttagttgacaactatatgccattaaaacctagattaaaaggcagaaatgaattgttcgataaaaaagaaaaacgggatccagtacctcttggagagtctcaagaaatagttagcatttgtaaatggtcttcaaattcaaaggattacagtgatcgaagagataataaagtcaagaaactctgtcgaaaaaggccaaaaaaagcgtgaaactatatatgctgcttatgttaacactaaacattgtgcttataatccaaagaagataaggaaagggaaagtggtagttaaatcaaagcgaaaagtacccacgacagcgacgtcaaatgaaccttcagttcagattgcaaaaaatcaacaaatccctaatgcagttagtaaactttcaataaatacgatgagaaaccagaagttggcagattttatgaagttagattgtctatcaacaatgccttggcgaaggaaaaaggaagaaacggtacagatattaagaattatcaaggatggcaacgcagagagatcgaaagctttagaaaaattaagagctgagagagaagcggctttgaaaagaacaatcatgggtaacaggactaaaaatattacaaaattctggtaacatattgtatttataaggttaaataaaatttggcattatttttacactcaaaaaaa

SEQ ID NO: 674 - DNA, 843 bp, Plutella xylostella
tttttttttttttttttcactctttcaccactgtcgagaaagaagacagtttgaaccatagaagttataaagactgaatttttcaagaccctgtgtttggattactttgttttacatggataatcttcaagtattacggctactcttggcggtggccatcgtacacagtacagtggcatcatcgctagaacctacagaaaaaaacctcagcgtcattccactcaagacacccttgccagttgaaaatgcaccaccaacccttatagaaaaccaaaagaatacggttaaattcagagaagcgcacaaaagaaagatgaaggaaatgcacgaggcaaaacttgacggatttaaacacaagttgaagaataaagtgaaaagacaagctaatagatcatggtcagggtataaaaattatggtaaccccccaccctatttagtttacaataagaaaatcggtgcatactatccttactacaagtttcctattgagaacaatgtccggcgaagtggcgctaggaatacatacagtaccatctctgggagcgcgcgaggcagttccaggaactatgtcggtagttagtcattgttatttacctcataagctatatttaaaaaaaaaatggtgtaagcctgccttggttcggcaagataattataatgtgatggtaaataactatgttgaaaacctccacttgtgttcattaataaaaatttgtatcaaaggtacagtcagctgcataaatttttattttggcaataaagcatattttactttactttactttttaaatagctatacacttttgtaccttgtcaaattcaccaactgcctattcattcatc

SEQ ID NO: 675 - DNA, 1976 bp, Plutella xylostella
ctcacgtggtgtagggttacaaaaccactcatagggctccgcacaccgcataacaatattggtatcggctgttgtaatttaaaacggacattataaatactagtggcgctggctggtgtagctgacttgtgtagtgagcgcgccggctgacagtgcaaagagcgggaaaagtttgacgtttcgagaaccgtttacgaagaaggcttgtgttcatcaatcaagatgattgtattaaagataacccttctcacggcgtgcttggcagcagcatcagctcagcagtacgcgcccaccaccacccccgtgccaatcctgaagcagatcaacaaacagaacgacgacggctcttacagcttcggctatgaagctgctgatgggtcgttcaagatcgagaccaagtaccccaatggcgatgtggccgggaagtacggatatgtggatgctgaagggaagaccagggaagtgtcgtatggagctggcagtaaacgagggttcgagccgcaaggaaccggcatcatggtgcctccgccgaccctgaatgaccctcccaccaacgcgctcaccgacggacaggaggacgacgggcagtaccgggaagaccccagcatttatgaggaccccaagtacaatagtcgcagccagaagtcacgaccgggccaggggttcaggtcgtaccagactgagccgcaataccagacgcaggtccagcaacctgcccagccgaggtatcaaccccaaccacaaccacaaccgcagccaaacttccaagattccttcttcagccagtctccccagcagttcccgaggccccagtctcaggtctaccaccagcagccccagttctcgtaccaagcgtacacgccacagcagaactaccaaccccagcagagtttccaaccccagccgacgtaccaaccccagcaggcgtaccaaccccaacaggcgtatcaaccccagtatcagaactaccagaatcacaatcccttcttgggtcaccccgctactaactttgacccttcaacgggatcttataccatcaactttactggatagtttttagttgttgaagcgtagactgtaaacatcttattgttaaaaaagataattctaagctgaggttctacgatttaaaaaggaatggtaaagaatgcaaatgtgaagagaataagcggttaacttttttaagaataaaataaatgtacaaatatattttttactggctggttttttactaagtaggtattagttcatttttattttgttacgactagtcaatacttttttttaaacgtagttagtagttttactttttgttaactaaaataactttcctgaagtaacaacgcaccctatttattgatgtagtgatattttcatccatttaaatctaattattgtatgtaaacttatcaatttaagtctaaatttaatgttttttaggctttttaaatatattatacacgacactaaacattaagacgacaacttcaactacggaaatcaatgaaacattgagtgtaatttattacattcatacaaaaaatcatcaaaagtaagttgtaattactaaagctcattctgatattttagtatgtttcatcctactgtactgtactatactgcacttatatcaatttaactaacactttctaccttgattcatgtatttctttacgagttcgcctttacctattaccaaaaaaacaataacgaaatctgtaccaacctacgttttgtttataaattaggcttaagtaacatttatataaatacgtattgtaaacaatattgagtaattacgagtgttgtggcgtgagtgcaaattctctgcgcacgcgtcgatttcaaagtgatcaaactgtcaatcgtcacacgaaacgtggaccgagtgtaaatatcgattaaataaaaatgttacgtaaataaaaaaaaaaaaaaaaaattatcgtagacatgttttctgtatgacgtgatgc

SEQ ID NO: 676 - DNA, 614 bp, Plutella xylostella
gtagcgtgtggccgccacggcgtcacccgtgtgcggcaagttcatataaaatgtacggaaattacaggaaatatgccagtggcggcgttttgtggccggtgacccttacatctttgtctaaagcttcacttccgccagtactgcgcgaacttgtggaactgttccaccagcaccgccatgacggccgtcaccgacatgtcgatcaggttctgcaggtagtgcaccgcctcctcgtcgcccaggtccagacgcagtttgtcctgcaccttcttgacggccttgtccggctcgagcgcgatgtccggcaccgacgcgtccaccatcagggagaataagttgaggaccaggttcgcgtgtcgtctcaaatgcagcagcgccgtgtagcacagcttcctgaactcctggtacggctcttgcgcgggcccgcccatgccctccaccatctcgcggctcagcttcatgggcggagggagaggcttggggtcccgccccaggatgtagccgaagtctatgtggaatagcgcgccttgttttgtgagaagtaagttgtcgaggtgccggtcgcctacgccaagtaaataagtgatgacgcaatacccggcgcaactccttat

SEQ ID NO: 677 - DNA, 1076 bp, Plutella xylostella
tttttttttttttttttgtcatagactattacctactctgtgctaatattaatttttattgctaagttttatttcctgttggattcgatttattttagccatttgcttactaaataaagtgcaaacatgcaacaaaacgacatggaaacaagtgaaatggatgacttcaatgcaatatccatttacgacgaaaacacccaagaaccgatcgtggagaaaaagtccttcaattcaataccagcaaaagattcacagtcacggaaaacattcaagaaaatgaccagtgctgatggtgacaaccgaagtaacatggccctcaacaccacgtttggacccgtcagcttcaaggaaagcaccacaggtatagccggggacctactggaggggaccagggtcagcatatcacctcaggaccagcccactacctcaaaggctaaaatcaggaaacgtcgccatgccaccatcgtgatcaagtcattgaggacctccttgccacgccaatcaaaaagcattgcgataaaacttctcaaggtcatatctaaaggaaaggcacctgtaaagactgtacttccaaggaccggaaaggcaaggactcagaagccaaggaggatgaaaagagtagtggtgaaaaacaaaaaacgatccacactcaataaagtacaaaaaagaagtatggcgccggcgtatagtcgttcaagatattctaactattcattcaattcacttgatgacatgtggtcctgctgtagttgaatgcatggctaatgtatttttagttaatttatttgttatagatgctctttattttttatattttcgtgattctcttctgtttattattttaataaaatgattgatttttgaattaaaacaaaaattattctttataaaaagtaaattacatgataaatataaaaatatcgcgttaattgacgagattatggagccatacataagtaccgctcagaacacattaagaaacagtttaccttatcatgatcaaatttatgtgagtaactgtaacttcacggatacagctgcaaaaatattacagctagaagctgaaggtagatatg

SEQ ID NO: 678 - DNA, 1968 bp, Plutella xylostella
tgattcgcgattgacatttcgtgtgcgtcgggcgcgccaccccgttccgtctacttcaacttgttgaatctcggagcgtcgaccggcccggctcgccggtattttcgcgcctttcctactttgaaacttacgatttccaacaacaactaagcttcgtgcgggaaaaattaacataaaacttggaacgagttgaaatgagttgccgcaagtgctccttgttggtggatgatgcttgccgtctgcggtgcactatatgcaagaaaacctatcactacttctgtgaagatatgcctgaagatgtttacgagaacttgtcttatataagaaagtatttttggtattgccaacgatgtgacatggcttgcagcggtttgctcgtaccggctgccttcccatcgctaaaccctcctcgctcatacgacatgcgtggcccaaccaccactcctgatgaagggaacgggagtggcagccctgaagacgagagggaggatagcagcagtgacgaggccacggacaccagcagctccgacgaagcctcggagactgacacgagcgactctgaactcaccgagagcagcgacgacgaggcccgagtcgttagactgacgctcgaaagtcgcatcgatgtctggagtaacaaggtagacgaatattacatccggatgagcgcgatcgaagagcgagtcgtgcagctggaggccgagtgggccgcgctggaccgcattcacgagagcatgagcgggctcaagtacatgatgagccagatcgaggccagctacaaccggcaggagcagcaccagcgcctgaagaacatcgagatccaggggctgccggaaatgccacaggagaacttgatcggagtcgtgcagctgatcgcctacatagtgggcttcatcgtccaggcggacgcgatcgagttcgccattcggatccgcctggcggagaagccagagaacagcggcttcgtgaagccggtgatcgtcaagttcgtctcgcaggaatataagaacatgctgatggcggcggtgaagcagcgccgcggggtaaccacgatggacctcggctacccgggcgatgctcgccaggtgttcctgaacgagcacctcactcccgccaacaaggcgctgctgcgccgggcccgtctgctgtgcaagatgcacaacttcaaatactgctggaccaagaacggcgagatctacgtgcagaagaaggacggctcgccgacactggccatcaccagcgaggccgatttgaagaagattaagtaaatgaggaatgagaggattgggaggagaaggcaggattgccagcggagtattatagtcattatactatgcattttttttaggtctcttaaatgtattaatgttaagtccggaaacatttcatattatattgaattttttcttacttttattgaataagttcagctgtattaattgaggtatggttttcattgtttgtagcaaagtagtagaattgattgtttaggtatttttttcaattcaagcaggtattttagtttaaaacttagtatgaaatggatataattatttggattattataattagtattcgtagctaattaatataaagtaacgtaattatttttgttttagataaggagttatttttttatataatttattgttattactgtatattttgggttttcaacagaaagtagataacatacttttatataccagttttaattgtatatttttttattcataaagatgttaatcacttacacattacataaatggtttattaagatcacaatagtatcaaattttcatttatctacgtataaattattaacagaatctttagtgattgtagtatttataggtatttcatacctaatattctattacgtagagtagtaattattaaatttaatctctttcattataagtcactgtaatggttacgatacctatttaatggaaaaaaaatatgtat

SEQ ID NO: 679 - DNA, 3233 bp, Plutella xylostella
ctttgtttctcaagttcggttctcggcaatgtaaatgagcttgttgtaaatgtagtgtggggaatctatgattctcagtcatcatcgttatcatcattagcaaaaaatttggtgtacaattatattattaagagcttcctcgagtgatgtatccagtataaactgccattgatgccatatttgccactgaactgaagtattcgtatcatcgattatctttcaccttgatcaatctacactggggtgcattcgactactatggtagactgtacaataaatcgaaaacatccttgcagacacccactccttcgcaatccaacgttgcaacagcgttctgaaacggctcgcgatcgatacgcctggcagtcggcgcccgcgaccaaagagtatcgttacctcgaaaaaagttaaacatactcgcgcgagttataccgcgaaaaaagtataacaatcaaatagtttggccgcgcgaaaagtttgacaaactttttgtgctcggttcttttttcaaaaatgcggttttgtttgcgttccgcttttgttctgttttgtgtttcagtgtgttgtgtttacggacaggatcaaaatgtgacagttaaagatgagttcccagccgagctggactactactccatgccggctctgtcggagctggatgacttcgacctctgcatgaggaagcctggagcggtctactgcatcgtggacatggaactgctggaggatgatactccgctgtaccagttcattaagaacttctcatctctaacctacaagaactaccgtcacagtaagctccaccgcggtgtctgcggcagccagcactgcggcctgaacaccagtcatgctgacgtgaaccctcaaactgtcagtgttctgagggactgcttcaaccagagcattcatcgagggtacggcttgcaggtagactcccttgaagtccggtactgcaagactcccgaacaaggcaactgggtgtctcccatcgacgcgacggacatcagcatcgggattgttctactcgtgctgtttctgatcaacctggcgtgttcagcctggtacttcttgtggccgccggagaaaggagaaggtaacggattcgtgttggcgttctgtgtacagaagaactggaaggctttgaaatacggcgggaaagctgatggaggcctcttcaagtgcttccaggctttgagattctacactatggtgatgatcctggggcttcactcgatgatcttcatagggtacggctacaccgccaaccccgagtttatcgaacattcctacgacgacttcttcaaagcgctcctgttcaacgctcgcgtcatcgtgcaaatcttcttcgtgatgggaggcttcctgatggcctacaagatgttccagtacgcggagacgcatcggttcacgctcaagatggtgcctatggcgctggtcaaccggtggatcagactgatgcccgcagtgctagtagtagctggtctcgccatgacgtgggtgccccacatgggctcagggccaatgtgggacgccgttgtggggcgagaacgcgagatgtgccgcaaaaactggtggcaactggccatattgagccccaatctgttcccgtttgagtacttgtgcttgccgcaggcttggtacctcggaaccgatactcagctgttcctcataactctggtgatcatgcatatcatatggcgctggccccgcaccgccgtcccgctgctctccagcgtcatggtcgtcagcctcgtcatcccgttcctgcagagctacttcatggacctcctgccaatcagagtcagcttgttcccggaatccatccgagacatattcggcttcaacgacacattctaccacgcgtacgtgtcggcgcagggcaactgggccggctaccacctgggcgtgatcaccgcctacttctaccacaaggcgcagactgagaagtggaacctgcacgagtctattttcatgaagctgctcttcctagcttccatcccgatcgcgtgtatcacggtcctgattggctgggacctccatcacagggaggcgagtgcttttgaggctgctacgtttaacgccttcaaccagaacttgttcgctctggccatctgtgtcttcatcatcggatgcttctatagagcaaacaaaatctacgtcggagccgtagagtggggccccctgcagccgctcgggcgcctctcctactgcgccatgctgctgcacgccaccgtgttgaggacctacggggggcagatgaggcgctctttctatgccacggattatactgctatcatgctgttcggaggaatagtgacagtcacatacctgttctcccttcctctccatctcttcgtagaagctccggcgtgcgcgcttcagaaactccttctgacgccaaagagaagaccaaagaacgagcaagaagatgacaacgggaaccaagtgaagcccggcatctccactgtttccgtgtccactgtgtccactcatatttaaacagtattattgaggagaaagtatagatgggcttgtttctgaaaaggtattcaaagttctgttgatctacggtaaaaaatatacaatagctgatggtaaggaacatcaaaaatttacagctatcaaaatatgtattttttgcttggtttttagatttaattgtttgaaattttgaaacgtctatgtaatatctgaatgcatattcgtaataatgatggaactagagacatttgatttaaaattactttgtttttgtatttgttttgttcgtattttgttaatctaagggtgggttgcatcaacatctcggttatcgtaatagttaaggttaaacttagcaatgacagagtcgttacagttaatattttactgtatcgtgttgcaccatcaaatcgtcggtcattgttaatgttattagggttgctattcgtttgagacataattatccccaaagttattgtgggaaacgtttttatgtaaggcaataccaaatctagctgtcggactgaagccgtcacagagtacattgtagccgtcattctctgtcaaagcactcaaagtcaacatgtcataggaactaagtctgttgttcctccaaatattgaccaaaagattatcatcaataaaacccgcgacaaagtagactctaataagcctttattaagagcggtggtagctcagtcgggtaagcgcccgcttctcacgccagagatgcgggtccgatcccggcgctgaca

SEQ ID NO: 680 - DNA, 1322 bp, Plutella xylostella
tccatcactattttggaaaaactattaatttgacaattaatgacagtgacttttctaatttcaaaatcaaaacaaaagcagctgtaaaataaactctagctggttttgaaaactctgttttggtgagtttttcccaaaaaaataaagaaatgtagattcaaataacataaaatcatgccaacatagcttagatttaataattccaaaattaacaagtgatacaaaatgggggctaaaaaaaagaagaagggaaagaagaagaagaaggggaagaaacctgcagccagagtcctgaaactaccatcggaaccgataccacaacctccattcatgggagttggtaatgcagtcatattcttgtctcgaccttcgaaactaaaagaaataatggagaagaccccattacatatatcagtatggaaccgagatcaagacatgaattgtataggatttgtggatgttgaatggcataaatctttcttggagtgtctagagcgatcagaagaactgaacccagcagatatggatgcagcccagtacagaaacactacgccgccagaaattatcaccaacacagttgaaatggtcaaaagattaagatgcgaagagaaccttctaccttcaggtgaaattgagttcttccttaaactttcctgtttagggaacagagttttatcccattttgttgccttaccagaaatggaaagaataccagggcggaaatacctcatagacgatctcaagttgaaagacgttgaagtagtaagacattgggaaggtacagctatagaatctgcccctccagttgcatacttctatagtgcaccggatataatcagagaacctataagaccagaggaagagcataaagtattcgaagattttgttgcaccgtttaccaagagtgagcttgctattctggccatgggattcccgaaagggccttgtggtggtactaactgtccaagaagaatggactatagaggcagtcaacatcagttcattttcggaatgacggataaaggaaagtatcaacacggcacctttataaatgaaagagatatgcacgggccttgtggtaggttggattgtccacttgccaagaggatacggtcatacctctgcaacgaaggatgctaccaaccttgtaggaagccatgtcctaaagaactttactagaaactgtgattcaatcatttagacaatacactttttaaacttattattattacactattatgactgatcgcgacgctctggtaacttgtgattgtaatatttgggttcaatagcaataaatgagacattgtaaaataaaagaa

SEQ ID NO: 681 - DNA, 1385 bp, Plutella xylostella
catatggagtcgtgtaacatggaggtaacataagagggtcaaaagtaacgtaaaatgttacttttgtaacattctggcaacgctggcgtcaagtgcgttcataacatcgattgttgcgtaacgtcacgttcagaaacgtccggtgtctgttgctggtgaaagtggtcagcgactgcattccgcggggagcgttcggaaacgcatgcttattcattttatataatagcctgttgcgagttgcgaccaaaacaaataggtttcgagccggtcggtcggtgcatgaatttttgtttgcggttgatgtttcgaaatggtgcgttcgtaaatccagaaacatcataatgttttgatgatgaaatctatctcaaagcagacatttcaaatttatgtttctatcattatttcaataggtatacctatatttaagtataatgttgagggttatggttgaaattacacgtttgaatatgaatataaatcatgcccaacatatttaaagaatgcattgttcggttgttccacaaacgcactagtggtacttagtgaccgaaatataattggcacaatgcacaaatcagccctcttatcaccctacctatgctacatagtaaattacacatcggggcagaaggtacctggctggatataaccgtgacagccacgtacgcatataaaaaaaagaaaatatttcccaatctgcataacttgacctcctttcactcgcaaaaagattagattgcgcaatgtccaagaatgaggtgataatttgctaaccgacctgcatgctgtcacctactaagtagatgaagtgattcactgactccatcaccaccgaagcaccggaactaggaaatcgattcgcattcaaacaagtttactgatgtaatcataataatgtgttttgactaaattaagtctttaattcactcatatgtcgtacaaatcttccactctgtttcctgctgttttaatgcgttcgttacttagttactgttaatgaaaaacattactttgtaggtacctctcctcaacatcttgcttgatacaagtaaagttaaccgacttaactgataaggtaatagctgaaacgaacagctaaactaaacttaacttttatgaactaaactaaacttttatgattcaaaaatctcttcacttttactgtacctatttgggacagaaacgtccgtatcacagagtatatctctatagtctatggccactaaccacaccctcgttctcattccaggatatcccgcggcagcagcgcgagcgccacggcggtagcccaccagctcggtgacgtcatggccgcttcaagagcccaccagtgcgacaagttccagtgtgagaaacactgatgaagaggacacacgacgccccac

SEQ ID NO: 682 - DNA, 4420 bp, Plutella xylostella
tttttttttttttttttttttttttttttgacatttcaaaacggcaacagttttgcaatccggaaaaattataaaaataaatcccgtattctgcaaatatgtgagatcccatctcacacataatttatcatcatcacggaaccatggaaattgcaccattgtaataacggtaccactaacagtcaaaatttatttccttgatcattgcaaaacgagccagctacgatggagctcccctttgaatttgacgcatttttaccaaaacattaatttaccaaaaccaaaagctgttactatgttccgcataaatgtttagatcagtgactgcactgtaaaattaagcaatgatccagcagcaaatccaataatatactttttaaatattattatcatttcaaaactatcataaactgtattgaatttaatgacgtaagtacataataaaggtattcatcatggaagacaacaaatacgcccggtttctaaggaataacataaacacccgaaacttacataaattgaaacccagtaacataaaagcgtccatagggcgattaaaaccagtaaatacgagctctgtaaaagatgctatcaaaggatccttcacaaagttaacgaatttcaataaatctgatgaaagttcgtcggatagtcaagatagtgattacgatgagcgtctcgaacaatatcaacaaatgtacgagccgcaagaaactgtccaaccacaagctacgtatgaaccacaacaacagtattctcctaaatatggtacgacttcatggtcagatacaggactgcggtctccgccaatgacacctaaggttgagacagaatctgatccaccttcaaatgcttcaacagcggattcttcatcttcatcatcatcttcctcgtcagctaaacagtcgtcttcgtcaactaaagtatcatcatcaccagctaaaggatcttctacatcgtctccttcgtctacggcaacagaagaatcccaccaatcatcaatatccgctccagaaactttgcctccatggacgcctatatcgtatacgcaagctcgaatggtaccatctgcaaattggtcaccaaaatcgggatcatttatttatcactcacgatctgaatctaaattgacaaaaaaagtatcatttagcgacgaaaaagcaaggttgcaaagtaggtctagaagagaggaagcaccaatacccaacatgagaactaattttgacgaaaaaccatccgaattagctcaaagaccgtcagatatgctaaaagaacaactgtcatcatatttgacgtcagaactcatgcctgatgaaaaaccctccgacatactcattcgcgatcgaagaggaaagttttacaccgtaccgggaagacaacctaagattgatttggaagctcaattatcatctcttttatccgtggatgataataaattaatcaataaaccgtcttccgaaccactgcaacccgtatcaatcatgaagacaccttctactataccgcaaatccgtagttcagttgaaactgtagcttctgttaccacaagcttaggtcaccgatttacagaacctgctgaaaattcaagaaatagatcagtaaatgtttcaggtaaacccataccaaactcacacaaatctagcaatactgaaaagaagaaaaaaaagaagaagaagaagaatttaaataagtgccataggccacggctacagatggaaacaaatttagattgggtaaaaacctatttacaatataaacctaaacctctaccaccaccaccaaagaaaacaaagaaagagatagaggaagataaagctttaaaagtattacatgataaacttcaagaaaatgcagataaattgaatgcaataaaaaaccgaaataaagataaagaggaaattaaagcagaggaagattttaaattatatgaatatgacggccacgagccccataaaggcagaccaccgactgcagaaattctatctcgagggaaacccacaacgaacctacaaactatttatacatatttaacggtagtggataactctggtagtgaagcagaactgtttgtagatccgaacaaacgtaggaaaaagaaaggtaataaaaagaagtcgtcgggagaagagtttataataatgtttgcagctgaggataaaaaggaagataagaaggagagtagcagtgaaacagatacgggtctccaaaaagataaacaaacgaacacgaagaaaaagaggcttaagaggatcaagaagaagaaagaggctcgaaaaaaactaacaacacgactcgtaacaaacatctgttttatgaaatctttgttccttcattgttggtctcgtgagggacttaaaccactcattgttactaaagaattagaccatacagaagatatcgattggactgagaaaactaaagttgatcccagagtggacagacctactgatatcgaatactacttgaagaagaatattacgcttgaaacgggtcatgttcgcacagttaccaagtttaatagcgaaaatgttcattctacatcaaagtcacttacagaaatttatatgggagaagaaactgcagataatcttcctaagtcgatgtctgattacggcagcctcttcaggaccaatttaaaccgatgctatatagtaaacccagtgtttattaccagaaaaaaatcagcgagaggattgctcgacatgccgaaagcgaaggcgaaacctgagccagaaggtttcttcagggaggaagagttcattgttagcaggtgttgccgctgcagtgggggcgtcacggtggaccccggcccagacggctgtgaggccaggaaaccgaagaggaagacttctagagacggggagaagcatcaccttgaggtcctgtctgaggacactgactccgatgcagtcagcataaagaggacagtgcggctgagggcgattcctagcgacatcagcatcagtgacatagacaaacaagacaacatcaagaggacggaccaaaccaccagtgacaagagtgaccattcctccgcgtcttcatcaagttcaaagtccagcgtctcagcggagtctaaggagtctgcggagtctaaggagtctgcggagtctaaggagtctgcggagtctaaggaatctgcggagtccgcggaagaagaagaagttaaggagaagaagaagaagaaaaagaaacaaaagaaggagaaaggttcttctgaaggtgaagacgaagaagcctcggcagccagcgactcaacactatcctacgacagtgcagataaaataccagacacggatggatatgactacatgaagatgtattgggaggcctacctgaacaatagcgtggaccccaatgaagagtattacgcgtatttacaacggtacctgcagatgctagacgcctcgactcctaagaatgaaaagccagttgctgatagtactacttcaggagaaaatatactaaaatatgccgctcagaacaaaaaacaaaggttactgggtatattacaatcgggcgcgaagaaagcaatttcagaggatcatttgagaaagatgaagagggcggcgaacatggtaaagaagaagttaaaactggacaagccggagccatccaacacgacgctctatgaagtcaactttcaaaccagctcctactccgtatttgatagggcgcattcggcgtgcaactttctgtacccaaaaataccgatactaaaaaaacctgtagagaatctagagccagaggaggagccggccctacctaaggtcgataataccacttccgattacatggtaatcgaggacaccggtccaaaatttgctgaaaatttcactccaggagaagccctggacaattaccacaaggacccagacgccgaggaaatgtcgttctacgactgcaaacgagaattcatggagaaaaccaaaaatggcatcaccatagtgcacgagctgcagcccacctactatgacgaagaggatgactaccgcaactacgacgacacgccgctgacgcgcgcggaccgcgagccctccgccagccggttctttgcggaatccaccagcgactccaactcctctatacacataccaagcagaaaatattcagtaagagtacgggaaagaaattttgaaagtgatcgtccgaaaaagagtgccccagctcgcagtcctcgcttcaaatccggcaacagaaggaagagcccaacgcaaatatttagagcccagagttcgtcatcatcatgccacagcttcaggagcccccatcgccgcaaatccgtaacgtttgattggacgttcaaccagcacacgccgatagagagagctcgatagcgtcccgtcttacgtcgcgtccatattatgctttacttttttatcattatgaaataaatatacatactgttgtctgaaaaaat

SEQ ID NO: 683 - DNA, 1486 bp, Plutella xylostella
ggcaccaacgccgtggggcggcaggcccagccctgcgtcttccagattgttccagctgctcgtccgtccccgccgcgcaactgcacggtgtcagccgggaacgactccaactggatcgaggatgcgtacccccgggaggaggtgggagacacgctggtggtgcgctgcgtggtcggctacgacggggggctgcctcagctggtggtgctggaggcgctggactctagaagcggtgtggtcaagtttaacgtcactgctaatgaaactgatggagttgctcaattcctcgtaccagcgatggcgttgtggtccagcggcagcaccctgcgcctgacggtccactcgaccaatgacaagggctcatctgacaagatcactctgcacgccctggcgtatcaggatcctgaaccaagaacagatggtgagagtggcgtagcaggcatatcaaaggcagccttttgggcgatcgtgctagcagctgttaccatcatctgcacgtctataggcgtagtcctagtgctgcgcaggagaagggccaggccgcctgcgaagacgcaacctccagagttgcagctgaacgctggggacagccaatatgtggtcgcgtttacactgaagccaccgcggcatgcgcagcccgatatactgaacccaccacctgatggagatccgctgggagcgtcatgtcacgaggggtcggtggggggcgcggcgatggacgcccccggctggggcggcatggacgcgccccctgagcccttagcgccccactcactagctttaggaatagatgaacaacgaggtctcttatccccccctcgaccggcagccagtaagcagccgatagtgacaggtacctccacgctgggcaggcggggacacctcatagccgaagatatacctggaccagagagttgtgtatagaactatagaaatgtatatttaattgaaaccccttagaacgtctggtgttcagggataactctgatttaattgtatctgtgctttgtttgtttagtaaaattaattctgcgtatagtaataataaaccgaaatcaattgtgtaattataattttaataaagataggagcgtcaggtgatcttgcattataattatgtacctcagaggtagacaataataagtacttttaattttatgatatcgcgaaaatgagctttgtcacataagtgtaaaaaggggatctccttaaaaaaagtggacataactaccatcactgtttgtgtttatcaagttattctgtacctacttcagtgtataataatcaatagagataatcatatctaagtatttgtcattaaacagttcttgatcagagttattcctattctcctccaaatggtaggaaattagattttttgtaaatattttactgactgtgacattgtgataaatctttactgtaaatataaaaagacaaaagaagtccatttcaaaaggaaataaaaggaaaaacagaagtgaaa

SEQ ID NO: 684 - DNA, 1467 bp, Plutella xylostella
ggcaccaacgccgtggggcggcaggcccagccctgcgtcttccagattgttccagctgctcgtccgtccccgccgcgcaactgcacggtgtcagccgggaacgactccaactggatcgaggatgcgtacccccgggaggaggtgggagacacgctggtggtgcgctgcgtggtcggctacgacggggggctgcctcagctggtggtgctggaggcgctggactctagaagcggtgtggtcaagtttaacgtcactgctaatgaaactgatggagttgctcaattcctcgtaccagcgatggctctgtggtccggcggtagcaccctgcgcctcacggtccactcgaccaatgacaagggctcatctgacaaaatcactctgcatgccctggcgtatcaggatccagaaccaagaacagatggtgaaagcggtgtagcaggcatctcaaaggcagcgttctgggcgatcgtgctaacagctgtgaccatcatctgcacgtctataggcgtagtcctagtgctgcgcaggagaagggccaggccgcctgcgaagacgcaacctccagagttgcagctgaacgctggggacagccaatatgtggtcgcgtttacactgaagccaccgcggcatgcgcagcccgatatactgaacccaccacctgatggagatccgctgggagcgtcatgtcacgaggggtcggtggggggcgcggcgatggacgcccccggctggggcggcatggacgcgccccctgagcccttagcgccccactcactagctttaggaatagatgaacaacgaggtctcttatccccccctcgaccggcagccagtaagcagccgatagtgacaggtacctccacgctgggcaggcggggacacctcatagccgaagatatacctggaccagagagttgtgtatagaactatagaaatgtatatttaattgaaaccccttagaacgtctggtgttcagggataactctgatttaattgtatctgtgctttgtttgtttaataaaatgaatcctgcgtatggtaataataaactaaaatcaattgtgtaatgataattttaataaagatacgagcgtgagatgatcttgcgttataattatgtacctcagaggtagacaataataagtacttttaattttatgatatcgcgaaaatgagctttgtcacataagtgtaaaaaagggatctctcaaaaagtggacataactaacattacaatctgtgtttatcagtgtataatcaatcaatagagataatcatatttaaatatttgtcattaaatcaacagttcttgatcagagttatccctattctcctccaaatggtaggaaattagattttttgtaaatattttactgactgtgacattgtgataaatctttactgtaaatataaaaagacaaaagaagtccatttcaaaaggaaataaaaggaaaaacagaagtgaaa

SEQ ID NO: 685 - DNA, 1990 bp, Plutella xylostella
gctgatcaaataaattattattcttcagggttcttggtgagattaatggactgggtttgcttttagatcttcggttacgtggttgacgtaccagtttctttcgatcgttttcaatatctttgtaacatgtggctgcagattgcggagtttgtggtttggttaatcttttaggcgttttcttcgattcatcatctttataataaggttctattttatccaagtcattctcatccttaccatcattgggggaaaatagttttctttttttcattaccattaatggtgtatcagattcattaccagctgtttctttcagtgaggtggtggaacccaaatctcttttatcttcgcccttttctgtaacttgggcggctgcagcttgcgcagatttaataaccaatttattcttattcttcgccttattatttactacctttttccctctttttgcggttttcttgctaaagcttaattttatcttcgctgaacccaagacatcagattcgacatcgttgacttgcatgacagcattattactttcatcggcagaaataacaccatcaatacaaacagcatcctttcctgtttccatattatcaagtaaccccaaatcagatttttctttatctaggtacagagcacacttatctaagtcatggcaaaccttatcgaccatactactgagacaagctattatatcggcatcaacctcatagtcatttatatctgcctggtctgctttatcgatgttcgacatcacatatttatcgaaactgtcgctatcagaactagattcattgatcttgcgggctaatgttgggctcaaaatcagatcaccgtttttattttctttaaagtgctgtgaaaagaaatcctccatatcttctatattgtaagagggtttataattttctttatcacccatgtctttccgaatggtagtatttttggacgcagacttgtatttcgtagttttacgtcgcgaactcacatagtttacgggtgtctctgcaatattatctgtcatatttgagtcatcagaagtagatattatctttgctttattgcgagcagttatcgaatcaggtttcagactttcagtgtttgactcatcggacgtagatttactgattactgtgcgtgacgctgtagtaatttgtttattaattatatcagtggtttgagttttccgcattgctatcgcttcaggagtattatctatagcctcactgtttacatcgaaagcggctacagccgcatcatcagcattgaatcggctatttttttccttttcatttagggcttcacgtaaagacagttcagcaagatcgattttgttatttttgttccgttcaaacctttctgaatcatcagtggatccaatagtagtatagagaaggcttttagaagtgttggttccttgaccttgctctggggagatgcatctggggtgtgcgtcttcattgtcactagggctggtcttggattttcttataaatttagtgttccgtgtgacaaaaccgcagggcttaattagtttgacagtggaagcggcttcgaaactgtctggttcgctcacttcggtgacgcaagacaaatttggttgagctagaacactgattggctctttatcgtagtacaatttcggtagtgcagctagtttatgaggtagctgggccaacgaagtggtggaaatggtagacggtgattgccagccagagacctgcttcttcgcataacctgaagctcttttctttctctgcgtaggctttgcagcgttactcattggtatttcgtacgaattcgacaatcttacttcttcatgctcagaatggctgaatctgctgtaagtgtcatgctgctgatccaagggtccagagggagagatgatagactcaacgccagtttccgtttctaccgcacactcatatttattgccgaaggtccgtcgcaaggcgtcatccagcgtcttgacatcggttttagatga

SEQ ID NO: 686 - DNA, 2977 bp, Plutella xylostella
tttctatcttgccaaatttccgtaagggattttcttctccctcgctcgcttttacttcttttaagaatgttataataaaattctttttttatatataatttgtcatagaacaatgtcaaaaccatgtcaaaacaactatttaaaatttacatcatgtcatcataaacgccgggtccaaaaatatgaaataaaataaaattagtctgaagttacaagcaaccatatctctcaatcatgccccaacatctattcaaatataatgaatgttaagaaatgcttcaaagaagaaattgaggtaatcaatagtactgttagtgaaattactgaagaaaacaaacttaaagagcagcaaaatgccgacaaatgcgaagaatacagaagaaaacaaagagaaacgacaggaaagaaaaattgccaaaagccaaccaaaacaaacgcggagaagaagcagcctcaagcggaccggcggcaagcgcagcagacgctcgagcaggagtcagccgagaaggaaccagaaccagccgaattagaagaggtttgtgatgacgcactatgctttgacaagataaaaaaccctgaaatattcatagaagtacctcctctccctggagaaatatgtgacccaaataacaaaaataaaactaatcgtacaggaaaaacagaacaaatagtttgtagggtccaacgaaagttacctactaatgaaatatgcgagggagcagctgagaagataaaagagaacgaaaaaaaatactcaaaggagaatactgatcgtggggagaataatgcagcctgtggtttagagactatagttacagaagaaaaaatacaagaccaagttgccgacactcaacaaacaaacccattttgcaatatacaaagaaaaaaggaggatataccaccaccaccaccaccaccaccaccaccaccggagcttgaactagatccttgtgaagaatacaagaaaaaacaacgaatgaaagcttgtcacaataaatataaacattaatacgactataaactcaacaaaaacatggataaacaaaaaactacagcaaacgggaagggggttttccatcgccatcacaatgataattcacaacagccacagcttgatcaaaacattgaaaaaagattatcccatcttgaatctgaaattattcgattacaaactgaaattgatgacatcagttccagcactgaaataatagatggaatacctagatgtctttcaacctactcggggaataggacttcctccatgaatacacaagatgccaaacatatttttccaatcatgttaactaataaattgagtaagaagaacgtaactcaaaaaactataatagagaacaagttaacccatcaaaaagaagcggttgcgaatatattgtttgaaccttcgggaaattatactgaactagttattaacactaagcaggatacaacacattgcagaagcaaaatacagaaaaactctgctaaagtcaaaacaaaatcaaaaaaagatacgaactgacaaattatgtatatataatacgtctcctttgttaatataccaatccattatccatatccattatatttaataaacataatggataaatctttggaacggtcgaatcatagtgattctgagtctatggaaaagcctaatttgccacaagcagaaccatctaaacaaacatctccaaagaacaatccaactcagcttagtattgatgaaaaattaacgcatctagagactcgcataattaaactacaagctaaattagatggagtgatcgatgatgaatcagaatcacataaaatatcagccagtacctcgatatccacgaaatcatcagaatttcagaacaatacaagcccactcagcgttcaatcgtgtccctttactttgtatagcggattttctaagaaaaatattcaacccaagaccttgatcgaaaacaagctgagaaaacaaacggaaaaaagatcggacatgctagttgagcctacatttcactacatcgatgcagcagtgaaagcaagaactgataatgtcaaaatacctccaggagtcgttttcagtaataaatttaccaagcaatgtaaacattcatcagaagttactatcagtccttacaaagatggcaaatatgccaagatagtatctaagcccaccgtaggcagaagacttactaaagaagaggatagagaatgcagagaaaacgtgcctccttacgacgacttggatcaaaggtgcaaagaatgggaaatcgaagagaaaagacaaaattccatcacttcgttaaatcagctaagcgatggctcacttcaagaaatgaagtcagtcaaggatttaagaatcaaaagcccatccatcagcaataaatccatcactagaggtagtaaagataaaattgaaaaaagagtagcgaattctaaatcaaatatgaggaaagctagagggagtacagaaaaagtaataaaaaagagtgtgaaaatggataaagatgctattaggaaggctcggaaagattgtgctagtacatcatcagatatcataatatcagtaagcagacgagaagtggtcccagaaccaaaaaaaggaaaaggttgtaaatgacagaagaaaaattaagaactgtcaactattagtctggtttatgaaaaagtaacaaattaataaaatatttcaacaaaatggcaaattccaacaaacatgctaaagaatgcacatcaaaacaaatagagagtgtggaaattgtaaagaatgctaaaggtactgaagatgttttgacccggcagctaggagatattaacattttacggaaacaacatcacgttataaaacgatacaaaaatcgtgaagaaactgttgttttgaaggtacaaagtactgacatgatttatgaaccaaacaggacgaagtaagaataaaatgaaacattttataggtaccttaaaaattgtgcaatttaagagataacat

SEQ ID NO: 687 - DNA, 2759 bp, Plutella xylostella
gctgtttgaattttcattagattcatttgaaatttattataactctgaaaatgataataatacacttgaatttactttgacgaatgtttcaaataatactttgcctataacgattatactttcaaacctggcacctttcagtctgaattacaaagaagaatttgacaaggattataacattgaaagtggtgatgaaatcaaagtaaatttaaacaaaaataaaatcatatttttccaattacaatttaatcctacatcgagaggtgagtatacatcaacagctgttctgtttttggacgaacatatggaaacaccatacaacaacctcacattttacggaagacataaaacaccagttatgactcctagtgtctaccaggtgatattccctccatgtggtattggagtcccaaagattaaaatattatttctcaagaccgaaggcaacgtggatatttcaacatttagtgttaattttggcaatgaaaaaaatgtatcggttgaatttgtggaagctgaggcaagtcaagatggcggtgcattttttacaatagtgcgtgtaaaaattttagtttcgtgtgaaaccatacactctgcacttatttatttatgtttttacaatgaaaatggagctgaatgtgatgttgaacttagtttcaatgtaacaaactgtgcaattaccttacacaacagcggtcttataagttcagaacaaaccccgtatcctttctatccgactgttgaacataatgacttgtaccagtatatggaagactgtgttgagtttcttgaagaatggttgtttcaagaaggctttaaaaaggaattgtatccagaaatcccaaatacttttcatattacttcaaataatctatcaagttctttagcagtttcatcatcgccgaaaaatataaaggtcacatttatgaactttttgaggcgaatcgtaggtcccttgataaatgatataaaaaaagaaaaggtggcggcggcggcctctgcaaacaagtcgtacaaagaagtacttaaattatacaatacgtatcaagagattacatccttactgcagatccggggttgcaagctatggacatgtcaggctatgtttctgctaagttatgatcagtttgtactttacacacaaaatgtgaaacctgcaagcaccaacgaatccatgctctatcagactctatcatcagatgaggatctctacaataggctaactaaacagtgttggctcgacctaattctacaattttataaagaatttatatttgaatgttgttatattgataacactggcgtaagtaaagaagaacatcagaaagaagacatcatgggtataataataaaatggtacaacgctcagattgacgagcaacatcataacgaacgtaaaaatgataaacggaagaaagttgtaacgaatttaacaggagatctatcggattgcatcgcaatcacttcagccattattaactattgtcccttcctaaaagatcatttttctctattttgtgaagtagatcagggggatgctgatggttccataattaccaacgcatgtttaataatagaggcgctaaacattcttaaaattagttttccactgaaatgtacacattttctaaagcctaatctactacgaatgttatttttatcagtacatctatatgttgtgcttcccatgttcaaacctagagacactgttgaatttcatcctcctctattaaaaagctcgcagcggtcgatagcagtttttgcagcacagcaagaaaattttatttacaactttacaattgttaacgatcctcacaacagtttcgctgctgaaaaagcggcagcagccggtaactcaaaaaaacagtttgttaaagtaaaatataccgctaactttgttaaggaacaaaaagctacgttgctcgtccatgggtataacaaaacacgattatttgacacctttgctgtatttgaactgaaaggagttgcaggaactttgagcccactaaagaaatgtacacttcatgggcaactttatcgaccgagtaaagcgagcctgacgatttcatcgccttttcaacacagtggtccctttaaaatatcaataataaacgatgaaccaaaagtaccggtaaacttggaaactgttcctaaaccaaagtttcatgtgcaccgcttaaatttggtagaagaagaaatcaatctagctggatcttccgggaagggaggaaaagatgcacatgaagagaaagtagaatttcaaatagtgtgtatgagtgtgcagaccgaatgtgcttggatttggttcactagtgaagtgggagagttcttcattagcgtggccacggagtgccggtgggatgtgccgacagggtcattgctggcgccggtccagccagtagagccctgccagggtgactcatgccactgcagccaggagactgtcatcatgctaccacatctaaacgaaatattgaccgatgctgttcggtatgcattgcaacaaaatggttcagacaccatgatgaatgtcttcgacgatttaatagaatcaaatgttggacggatcgtattgggtgagttgtttgaggaaagcggcactaacatgcatgaggttgaccacatcctgagaaacgagaagaggtaccaagtgtccgggacagggcttaggccccattcaccgatcatcactctgaagcagcactccctcgacatcctggccctacccgtagtagtcacgaccgacacggccgctgata

SEQ ID NO: 688 - DNA, 1122 bp, Plutella xylostella
tggagacgctgatctccaacgaccgtctgctgaagtcctacatcaactgcttcctggagaagggacggtgcacgcctgagggatctgattttagaagtaagtcctggttctgctatttgagtgatgggatgcaagaaaagagcctttcggagtgtcatagcgactgttctatcattatattatttctatataacgataacgagataacgatattatttctggctaatcctttcaccacgccttcgcaacgcaaaccttctatgtttaataaaatcttatcagatacacaattttctaattaaaattttggtacattgccaaatctatatttgtatatataggactatacaaatattaataatataactgatatataatatataatacagttacacacttaacgagaaaatgtttatggtcctattcaaataatataggtagttagatttatctgtttgtgctaggtctaacgttattcaaataagtttcgtaagccaaaactaacgcacgggttaacctttaacaaaacgcaactcaattgtttgaccgtattctaatacaatccacttgcacatactcataccggcttaaacattgttcgtaatgctattcatatttactcatcacacattacataaatggagtcaataaacaacaagactcttgaggtcaaggctttcgtttcaataaacctactgagcaaccgggattcccgcttcgtttgcacatgcaatcatcgaaccagctaattgtgcaagaaggatgttaacaaaagacgatcggatagtgaaatggctagtaatgctggcaatggacctgaaagacctgggtttgaaacccgccgggagcaaattctggcaattccacagacaaaaattggaccttctcgatatttccatatacccgatagatggaaataagcagaactttactaaactagcaaaaagtgaagcaatgcacctttgcagcgagtgaatgaatctttacctaataggcgttttcttttaaaattatgtaggtatttaaattaacaaaacttttcaatttgtccacagaggccctgcccgaggcggtggagacgatctgcgcgaaatgcaccgagaaacaaaagacgaacatcaa

SEQ ID NO: 689 - DNA, 5930 bp, Plutella xylostella
cctaacttcccttccccaggacacccgcacggagttctcgtgcacgcgccagggctacttcgtgcacccgcgctcgtgcggccgcttctaccgctgcgtcaagttcgaccagctgtcgccggagtacacggtgttcgagttcgactgcccctccggcctcgcgttcgactctcgctacgaggtgtgcgtgtggcccggcagcctgcccgacgccagcgcctgcgcaggctcctccgagatcgcgcccgtgcccaggaccagatttgtgtgcccggaccatgagggttactacgcagaccctgagaactgtcgttggttcttcgcgtgtctggaccacggcacgtcgcctctcagcgcctacgagttccgctgccccttcggcctcggcttcgacgcggacaggctcaagtgcgactggccctggctggtgcctaactgcgggaacgtggggcggtacgaggctcaggcacatgggttcaacagcgccgttttgactggtgcatccggctaccacggacagaccgctgaagcggtgaacgtagcggctcaccagagtcttgcttcaggagccgcgttaaacaacctcgtcggaatccaaggaggctacctcagccaggccgacgctttggacgcaaacttcatagcatcccaggagtaccacagtggaggtgtcagcgctttaggtgccggacaagcctatcaaatcggccatggcaatggtggtgtgcaatcgaatgcgctagcatatcaaaccgcacaagctggtggtataggactagtgcaacccaccaagtacagcgaggagagcaaatataccagcggttccctattgctcgacgactacaggctaccgaccggaaaatctaacgcaggttacgttcaacaagcaaccggccttggagctcagtacaataacgggtacaatggagctgttgggtctaattcttactccacttcgtctttgtcttcgagtaattatgatcaaaacaaaggtattcagtaccaagctactgctggtggatattctaacgccgataattcaggtgcttacgttcacgataccaccggtgaccacgcggagccctacaggcatgaagatgcgccggcagtaccctacatacatgatggtgccgcctacaaagattacaatgactaccaggaaagcaggcgatacaaggaatcttcccaaggagattacgcaggaaaatacgttcacgatactagcggacagtacgactctgaatctggaaattacaatggccattttggagcctcatacaacactaaatactctgataatagtgggaagtataatgctgactactccgggtcatacaatggcgattactcaagccaaataaataccgctggaaaatatgtagcaggtatctaccagaatgctgggcaaagcaatttatacagcgtttccaatatcggaaacgtaggaactgcaagtctaaatagccaaggaacaagcgggtctaacattcaacagtaccatggaagctatgctggcggcaacagcggacaatatctaacagacggtaaagcatacaccggcgcttctcatacactagctgctggatcagtgaacgttggtttagtaggaaaaactactctagttgatgcagcttatgaagaaaactcgcatagcaactaccagaactacgaatctcaaaatgcttacagtactgcatcacagtcacagtcgtataacatagggtatgatgtagcccaacagtctttacaaaacggccagctcggctacatatcacaaccagctgtgtctattaatcatgtagggactgattcacataatcttgatggatacatttaccacacaaccccaactgcatcgttagcgccgaccaccgctagacccattgcagtgaccacggctttaccagctgtcactacaacttacaaaactacctacgtaccagcagcacccacgactagcattaaacaaatatttggcatctcccaaccagctgttacatacgtccagccaacagtcatccctgttaaacaatacgtgactccgagcattgaggtgactggatacaaccaagccgttgactatcaatctttcgaaaataaacaaatcgtaaataattacaacgctgaagcttctgtcgcaaaatcagagtccgcgggttacgattattcaaagccgagtattaaatttgaagaaggagtaaatacatacagcacccccgcacccgccgtccaagtatccacctaccagccgcaatcatttaaccagcaaactgtccacaatgttgaatctgtacactttggatattccactcccgccccagcaattgctgaagctgttaaacctagtgtggaggtgacaggatacaaccaagcggtagactatcaatcttatgaaaacaaacaaattgttaataattacaacacaaatgcaaaagagtcggacggttacgattacccaaagccgagtgttaaatttgaaggagttagtacattcagtactcctgcaccagctgtccaagtgtcgaccttccagccacaatcatacaaccaacaaacagttcacaatgttgaatcagtccacttcggttattcaactcctgccccagcattagctgtagaagagcctttcaaaaaggtggtggcctatactgtggggccccaaccagttgcttttgctcaaccaactgtggaaacatacgctcctcagtcgtttagttcacaaacaattcatcagacaaacgcagctaaagttgattttggagttcaaaattatcaccagaacagggttgaggtagcgtatgagcagccaaaagccttcgtccagtacagcacagtacaaccagctatagcagtccagtcaggagtgtcagagtaccagccccaagtgtacagtcagcagacagtacacaacgttgacaccagtcaagttcaaattaaatctgaagaagcatcaggatacgactacccgaagccagcggcgaaattcgaagaagcaccgaaactgattgaagtttccaccgcacgaccagaagtaacagtatccagtacatacaagccacaatcttacagccaacaaactatacacaaagttgaatcagaaacctacttcccagtttcatctactgttcaacctaaagtagaattacaatatcagcaaccttcggtatctgtttatgacaatccgattctgaagtatacacagaagattactcccgtatcgtacgtgaaacctgtggaggtaactcaaacttatcagcccacagtacaacaacatgaggttaaacaccatataagtcaaccaatccaatatgaatcggtacaacaaaactacaacacagtaaatctacaagactattcgtacagtcagccagaaatacagagggagtcttttaagtctggtatcaaatattcattagcaagtgacgtgtctcatcaaataattaatcatggaattgtaaacaatcaatataacgccaaaaaagaagacgtagtgttcgtatccagcacgccatcaactctggcttatgaagagcattacagtgaatatgaagcacctaagaaaatagaaacatatcaagcacctgagtacgtacctccgaagaacaattaccaagagtcttacacagtatcgactgcatccacaccagtaattcaaaaagttcagagttatcagcctgccgaatacgttcccgctaaaaatgactaccaagaaacatatagtgtttcatcaacatcaccaccagcagtacagaattacagatcacaagaatatgtaccccagaggcaaacatacaaagctacagaatacgccgctccaaaaatagtgtacgaggagtcttacactgcttctccaatagtacatcaacagatttcagcggtccaagatcagtacgattacaaacagcaagattattcacagcaatatgaatactcacaaaagattgcaccagtccagcagaactcttttgccacttcttatgtaaaacaacctaagacagtggaatcgttccacatttcatcttacccggcttcgtccgtaaccgtaaaacccatatcgtatcaaagtcctgagattcaagttggctacaatgccgaagaatacttgccacccatagtgactactgcgaggccggtgactacaacctatgccccacgaacatactcaaccaccactacacgagagaatttgccccctacttcagaatctaataacgatagagaatatttaccacctaaggttgacaatacttacatacctccatcgacaacttctcgaccagtttacaaatctacacgcccatcgaccacttacaaatacgtagagtcaaccactttccaagctcctgaatacttaccgcctcaagaagatgaagactccaatgtaaacttccagagtttcggcctgaggaacaatccctatcaagaatatacagtaaacaaagcggaagcacctagaattacatcgacaatcgtcccagttacaagaaagccaaatttggtggtcgaaaccgcaaaagcaaacctccttggatttggtactgttggacctgatgctggtttagtatctactgattatgtatcgagcactgagtcatatccctccatcacacaaaaggtagtaacatctacctatcctcccgcgattaaacaaggattagttgaaattaacccgagaccagtgccagccagaagaacaaagcctaaagttgctgttgttacaaaaataaatgacttcaatccgcttctggtcagaaaacttggagccgtctgtagttgccagtctccagttgtagtacttaaaggcaggcgaccgagtgttcaggttcaggattacgatgtggactacagtaatgattatgatgatgccggcaggggagatattggtagcgaagatattgtcagaacatcttacaaggaaagtcgacctgctagaataaaatcagtaacggtatcgcccattcctacatccactttcaatcctatcattgttccagatgattcatactaccaagacatttctggtcctaacgactacagtgtagacattacaccaaagaaccaagaggtatattctgacagctatgtttccagtaccccagctgtatactcacccaccactgagaaggtgtacacaattagaccaagagtaaaagcggtcacagttgcccctacataccgaactgttttactgagggaaccacaatcaactccagctatcgttgttaaagacagccaggaaagtcacgccagtactgtggattcagctactttcgacagatacggccctggaggcttgaggagccgtgatgaaactctgcaaggatcagtggactgccagcgagctggtctgttccgtcatccgaaacaatgcaacaagttctacgcgtgcagatgggactgcaccaagcagaggttcaccctgcatgtgttcaactgccccgtgcaactcacatttgatgcctccataggggcgtgcaactggccgagccaggggcctgcctgccagggagacactcttcttaccaatactctctaagcttaatattaaactaatgttgtgccatcgaatttgtgataaaatgtgatccaactatccacatgttgccgtattagctgccttaattatcgagatggacatgcctctcctaatctgttttagatgcttattatttatttgttgtgttaatttaattaatagttgtttatttattactttcattgggctcaagtttgcctagcgttttggaataaaattttagctgatcattagttaccatgtctagttcatcatctcttttaattaatgttacgtcttgtaaaatagtgaagtcatgatgtttgtgtttttttaattgatagagatatgctgtaattgtaaatatataatatttttattcaaaaaaaaaaaaaaaaaaaaaaaaaaaaaaaaa

SEQ ID NO: 690 - DNA, 2747 bp, Plutella xylostella
gtgagcgcggtactctgtggcagtccgcagtgcatcggaggccggcgcgcgcgacgcacgacgctcgtaccccctcgtctgtctcgctacgagcgtaaaagaaaagttgcgatcgccgcgcgggaaacaagtgaacgttttgcatctcggttattggacttttaagtgatttgttgtcgttgtttcgtatggaaagagttggattttatgttgaatggtcaatgaacggtattcctgttgccgcgaatatttagatcaagtggtcggattgtgcaatacgtgacagtgtcggatcgcgtaaagagatcgagtgaaagttgatcagtgtcgcggcgcgtccagcggagccctaacaatggagcacctgttccggcagcggcggctctccgtacccaagaggacgagcgagctggtggccctgctggcggtgtcctgtaccctgttcctgttcctccacacgcgagacctcagcaccaagctgcgccgcatggagggcaagctcaacgatgacgtcaccgccttcaaccacctcactgaccgcgcacagacggaccgcacggagcacggatatgcgtctgcgcaggagtacaagcaggtgctggaggccatacgcagggagaccaacgcggggggagagcgcgccaagccacagcgcacactcgaggccgaatctgaagagaacgagctggacgccaccctggctgagccaccggagtccccggagcttgtcccctcggcgtggcagctcaacaacacggcgcgggccggcatggagctgctgttcttcaatagggtgcccaaggttggcagccagaccttcatggagctgcttaggagactcgcgctgaggaataagtttgggttccaccgcgacacggtgcagcgcgtggagacgatccgcctggcgccggcggaccagcaggcgctggcgggccacgtcgcggcgcacgacccgccagactcgtacatcaagcacgtctgctatactaactttaccaggtacgggtacccggctcccatctacgtgaacgtggtgcgagacccggtggagagagtcatctcgtggtactactacgtgcgagcaccctggtactacgtggagaggaagcgcgccttccccgacctgccgctgcctgaccccgcctggctgaagaaggacttcgagacatgcgtgctgagcggcgaccgcgagtgccggtacgtgcagggcgagactcacgagggcatcggcgaccaccgccggcagacgctgttcttctgcggacacgagcccgagtgcactccgttcaacagtgcggaagcgctgcagcgcgccaagcgcgtggttgaacaggagtacgcggtggtgggcgtgctggaggacatgaactccacgctcacggcgctcgagcgctacatcccgcgcttcttcacgggcgccgccaagctgtactgggaacaactgaacacattcaaccgcatcaaccgcaacgcgttcaagccgccggtctcggaggcggtcaaggacatcgtgcgcgccaacttcaccagggaaattgagttctacgagttctgcaagcagaggctgcacctgcagctgaaggctctcaaggaccccaccatcaccctccccggcacacgcctccccacaacctccggcagaagccttagaaagaggagggcgcagagaagacgcggcgtttaaagtaacaaatgagcattatttgtgaactcatgtcgtcggaaaagacttttctccaccgttttgtgagtgttttgttttatagtgaggtcttcagtgtgcgaaagtgacgccctctgtgttaaaagtgatgaagctaaatgtcgagtgaggttcccgttttcaccgcaagatggcgggactaatggggatagaggaaatatctggacattgaataacatctagaaaaagtttgttattaggtactgttataacattttatagctgataagaaagattctaaaagatccaaagtacgttaacttattaaacaaaaatttgggcacagcggtagcgacttttgttaatttgtagataaaactatgtcaagactatttattgaataataagtttatttaagaacataaaacaataaatttgaagatgtggatgcagtaatgaagtggtttcagttttgttattttagaacatagaatataacatgcttcttattactattactatgctatatttggataaaattaagaaattttcggaaaggctggaatattaattaggtttttgcgcattttataaggtatgaaggaaactacactagaaccgaattattatagccgagcctttcaggaactgcttattttatgattaggtatgtagttttatgaaattaatttgattttttaaaatctagacgtctttcaaatagaggcttcaagattttcatacttaagtatacaaattatttaaataaaaaatctaatttattgtttagtgaagttgaactgaaaacatcattccatgaaatgtgatatatgttgccttttgtacatattgtaaaataattagattattttcttgtaagtgaaaataggttacctaagtacataagatctatgtaacttagtagtacatatgtctatagttttaaggtctacaaaatgctgagttggaactaaatacttacttagctgctaattttaaatcattttgcgttgtttttttactaacactatttgccgagaaatctcaataaacgagtttgatgaacaaaaaaaaaaaaaaaaaa

SEQ ID NO: 691 - DNA, 3460 bp, Plutella xylostella
gaagtccgacgagagggagaggatacggaaattctccagtccggaaacttgctgtaccaccgggagggcgaccaactgtcccaagggggtgtcgggttcatcgtcaacaagtccctcgtcaacaacatcgttgaaatcggaagtgtgtcgacacgggttgcgtacctcatcctgagaatatctaaacgatactcaatgaaggtcatacaggtttacgcacccacatctaagcacaccgatgatgaggtcgaacttgcgtatgaagacgtatcgtctgccctgcgtaagttcactactcatttcacggtggtgatgggagactttaacgcgaaactcggaaaacaagaaggcggcgagacgaaagtggggtcacatggatttggagtcaggaaccatcgtgggcaaatgctggctgacttcttggagaaggagggcctctatatgatgaactccttctacaagaagaagccacaaaggaagtggacgtggattagccccgatgggaagactaaaaacgagatcgacttcatattgacggataagaagcacatattcaatgatgtctcagtgatcagtagggttaagaccggcagcgatcaccgactcgtaagaggcactttgaatataaactgcaaaatagaacgctcccgtctaatgaagtccacgctccgtcctactcctgctcaaatccaggatcccgaaagctttcagtctgagctttgcgaccgcctgatatgtttagagaattgcgttacagttgacgatttaaacaataggtttgtggaaactgtccgagaggtaggatcgaaatatttttcgtcccgaaccaaccgaggacctcaaaaactctcagatgggactctgagtctcataagagaacggagagaaatgaggttgcagtcttcagttgatatggtcgaatacagacgtctaaacagacagatcgccaaagcaagacgttgcgatatgagacgctacaattgcaagcgcattcaagacgcaatagagcaaaacaagggctccaaagtctttgctagagatcgatctgttcggcagactctgttgacccaactgaagaccgacactggcaacaccgtttcatcagtgcccgaaattctgggagaaattgagagattctacggacagttatacaccacaacacaaaaccctattaccagcggtgctcacgacagccgagcgccactcacccgacactataccgaagatattccggacgtcagtctagacgagattagtatagctctcaaacagctaaaaaacaacaaagctccgggagatgatggaataacgacagaacttctgaaagccggcggtagaccgattttaatagcacttcggaggctgtttaattccgtcatactcgaaggcacaagcccggaggcatggagcagaagtgtagtgactttgttcttcaagaaaggcaacaaagccctattgaagaattatagacccattgcacttctgagccatgtgtacaagctgttttcgagagttattacgaatcgtctcgagcaaagactcgacgacttccagccacccgaacaagccgggttccgaaaaggctatagtaccatagatcacatacacacgcttcggcaggttatacagaagaccgaggagtataatctacctttatgtctagcgtttgtggactatgagaaagcctttgattctattgagctctgggcgatgcttcaatcccttcagcggtgccatatagactatcgctatatcgaggtgttgagatgtatgtacaatgctgccacaatgtcagttcgattacacgaacatagcacaaaaccgatccagttgcaaaggggcgtgagacagggagatgttatttctccgaaactgttcacctgtgcactggaagatgtttttaagcttgtagagtggaaaagactgggcattaacgtcaatggcgaatatatctctcatctacgatttgctgatgacatagttattatggcggaaacgctggaggagttaggcgaaatgctcacagacctcaatgatgcctctaaacaagttgggctgaaaatgaacatggacaagacaaaggtcatgtcgaacgaacatgtttcatcatcgcccgtaactgtaggaggtgtcaccatcgaagttgttgatcagtatccctacctaggacaagtgatccgattaggtaaatccaacttcgataaagaggtagctcgtagaatccaactcggatgggcagcgttcgggaaattacgacacatcttcactgaaaacatacctcagtgtctgaaaacaaaagttttcaatcagtgcgtgttgccagtgatgacttacggagccgagacgtggtgcttcaccaaagggcttatccacaagctcagagttgctcagcgtgctatggaaagggctatgttaggcgtgtccctgcgagataggattcgtaatgaagaaatccgcaggagaactaaagttaccgacatagccaaaaggattagcacgctgaagtggcaatgggctggccacgtagcccgcagagccgacgaccgctggagtagaaaggttctggagtggagaccccgtgtcggcaaacggcgtgtcggtcgccccccaacccgttggtctgatgatctgcggaaggtagcgggaagccgctggatgcagatggcgggtgaccgtttggggtggcgatcgttaggagaggcctatgtccaacagtggactacggaaggctgagagagagagagagagagagagttaaagataaatactaataaaataaacttacaaagaggttttcacgtttctaaattcggaagagcaaaattctttatttgttgcaaggaactcgcccaacatcaataaatcgatcctgggcaaatttgcactgtttgccttaacaaaacctggttccattgttaaagatagattcgtgttataaagtcgataaatcacaaaaacaaatatatatcaatcgtaacgcgcaatcagtatgtaaggtaatcaaaacacagtgaagcgtacataagtatgacgtcatgcgctgtgattggcgtttcagtcaaaatggccgattgcagtattttactcttttattttattgaaaatcttattaatctcaatttttttaataaaactaaatcagttttttaaatcctttgaatgtgtattttcctctaaagtcattaaatctttgataatgtaatactgtcgacacgcctattatgtatcataactatggcacttttatgtcgataatatttattgcctcgattgtaagctttgaaatcgccatgaacggaaatatacgcttttttataagaattgcgttagataccgtctgtcataagtttcgtcatagtgaccgctagaggcgctgctttgtataatgaaaaagttttcatatgcgcaaaacatcaaaacttacactcgagttactgtagggcgatcacgaaaaacagag

SEQ ID NO: 692 - DNA, 2012 bp, Plutella xylostella
cccccccacccccccccccttcccctacacgacgctcttccgatctgcttggggttgacgaagtatataacgtcggttaacgaatagaaacatttttttaaacgtatgactactttaattaatgtagtatgtatgaggtagtctaagtcaaaataacgaatattaaattactttttatcgacgtatttagtttttaaaattcattaaacatcataaatatataatatttaatttatatactatattaaacttaagtattagctggtgaacaataatgtatgagaacaagcttaatcgggatcgctgtttaaggacaagttctattaaagttaaagctatacttcgatcagtgtaaatatattcgctatagacttaaagctattatattaaaataggaaataaattacgttatcaacaaaaagtgagattaaacttaataatattagtacttatagccaactggactacactgctaaacgttgacaaaatatagtttaaaaaaagaatctcataaaaaaatcatcattgtttagtcagtgtaacagttgtccatagaatagttatagtacttaataataatactggaaatcgtagattctagaaacgaatattataaactgcacaactgtaactataaataaacaaaaatatatatctacgtcttcatcgtaataagcatttgcaattaaagaaaactgcaacataatattattatatatataaaaaattataaaactaaacgaattatatatacaatccatttatatgctttattgcgttgactacatgattcaacaatcgactttgttcactataaaataacttactaaattgcaaatgctgcatatttgagtatctacatctatattttctgccaccacagttacttaaactacacataatatttacatataactagtgtggaaagttatatatccataatacctattgcaataaactaaatttcatatcgaaaattcaattaatgttagtgatttccattgcaaccaagtttgtctattaagccccagcggcgtaaaattttattaattttcattccaatatgtgtttcgaaaccatatcagtgctatttagatattaacatgatttcatatttattcccagatttttacaaacttaaaggttatctacttatttgtgaaaaaccgtggccgtttctttttgcttataactgatgcttaaaatgtacatacctacttaccatagctggattctagccagtcggataataaattatatattataaacatggctaatatacagattataagcgagctttatgacctatttagccaacaaaagatttttgaattttttgaagcctggttttcattaagtatttcaataaataggtacctggtttcattaagtattgcatcagctagtctgtgataaaatctgttaactaaagtagaaacaaagtggcgatttgtgcaaacgtcttcatttgtcgcttatttcaaattcaacgcataaaatagctagttcaatgtttaaattatttgtaaataatgtaactgcttgtacagatttaactataataacatcttgtatctatccgtaattaccttcatatcaaaattatcaagacagagataaaatttgaattacagattgcagagctaggctgtgaccttgaacgtacctataaaatggcggcggttgcagtaccatccaataggaacagagtgctgactcggaatccaccaataagaagctttcatattgacgagagccaatcacagcaccgcttaaaagtctgcgttcaagattactggctagcactgtacatacaaacatattacatagtaaataagtcccagttttttctacgaagtaatgtttgctcctcttatacataccagatgaataaaattgtaatacgctcgttaaatacagtaaatactttataagcttgtgtcatacacccataataccatatacattaatatatgataggtgacaacggttcacaataaaacgaagacaag

SEQ ID NO: 693 - DNA, 3811 bp, Plutella xylostella
tgtgtgtgtgtgtgtgtgtgtgtgtgtgtgtgtgtgtgtgtgtgtgtgtgtgtgtttgtgagagtatgatttacggctaaattcgatatacataattaatattacttataaattacagttcaataaagttatcaatgaaactttccgtttcatcataatttaattttaggattagattagttacaatatatttagtttctatgctattcaggttgtagacagttttatatttattaactttgttataaagatagggtccgaggtaaagaaagaatcttttagtgaatgtaaagttaggagtgggaagtgtacagattcggtctttacgtcgtgtgttagagatagtgtgtggtgttctggtgtgttgaataagagtagtgttaagaataaaaagttgtctaacagaaagtaccttacataattgatacagttgaaatgtagggaaaaggaaaggtcgaaaagtagcaacttttaaaatagcacgttgagctatttcaagaggcttaatatacgttttgcaggcaccaccccaaattgttatacaatatgagattattgattgacacatcgcatagtagacggtccggatgatatgtggattagtaatgtgtcttaaagttttaaaaaagtggatcaatttcctaactcttgatgtaaggtggtcgatgtgggctttgaagttaaggtatttatctaatattatgccgaggtattttattgtatcagtcgaggcaataacaggacatatacattcagtgttcagagatactgtttgagtttgagatgaacaagtgtgagctttaatagaaataggaattgttggttgagaatttgaacgcaaagaaaaggtaataagtttagttttggaagtgttcagtgttagtgagtgtgagagaagccaattgtatacataattaaaacctatttgagtaatactttggagttctgtccatgaattagctgagaaggtgatagcagtatcgtcggcatatgaggttataaagccattttgtaattcaagattgcagagatcattaataaagacaagaaagagtgtagggcctaagatacttccttgaggtactccataggagatagattgttcagtgctaagatggtcatttattttaactatttgggatcgatcagtaagataactttggaaaagattaagttgtgttcctctgacgcctagagattgaagtttgagtaaaagggtggggatgggtaccgtatcaaatgctttggcaaggtctaagaatatggtaagagtctttttacggttgttgaggtgatgaactaattcgtttattaaagccagtgtagcatcagtagtggatctatgttttcgaaatccgtattgttgtttagataataagttgtttgattccagataatttactaatctattgttgagaattcgttctaaaattttggacatggctgtgagtactgcaattggtctgtagtttgtaactgctttcggatcaccacccttgaaaataggatgaatgattgcctttttgaaagaattgggaaaaacaccagtgtggaagcatagattaaatatgtggcataaaataggcgtcagagttttactatatctttttaggatggtggctgagatacaatcccagcctgtagcagcgttatgtctgatagatttaatggcggattcaacttcgtcattatctgtgtctagaagggcgaaagaagaagtagtggcagcggttgattggatactgttagatatagcggagggtgattgaattttttcagcaagttctttaccaatattggcaaagaaactgttaacaccgttacatgattgtattgctgttaaagaagaagatagtagatgagtaggtgaatgttgttctttggtggagttagtggatttttttattgtttcccataaaagtttactatttttacccgcttttttaatttcaaatgcatcatgttgcctttttaccttttttaagatttttgtacaaaagtttctgtatctggtataggtgacttttagtatttcatcatctggagactgttttagttttttgtgcaagtgatctctatttcgcatgcattttagcagccctggagtgatccacggtttcagtattctatttctcttaggtaggatttttacggttgtgtttttttcaatagtgttagtgagatttactataaggcaatttgtagcattttcgggatctgaattttttaaaattggttgcaagtcaaggttttttatgtcaaggtctaatgcttcatagtcaattttttgaattttcctaattgcattgtgacgagatgtttttgtttcaaggcaaatcattgttgaggtatgatcagtgatagtagaaggaaagatgaaagtttcagaagaacatttagtcctgagaagagtgtggtctagacaactattgtttcttgttggtaattggtgggctggaaggaagccatgaaatgctatgttgttaaggtattcatgcgagcgggtgtcgagtgaggaaggtgttatgtctatattaatatcacctgttactatgactgttttcgatgatgaaagagaggatagtatagaattgaatgaattcaaaaacgtattaatgttgttattacttggggatctatagatgcagaatatggagatattagtatctaatttaattaataggccagatgcagagttttgtaagtctggctcttctactgtgaatgagagattggatttaatataaacaacaactccgtcactttgattaatatgcttcgtggtacttaaagatttataattcggaagggtcgggatattagcattagtcgcacaggggagccaacattcgtttaagactataatatcgcagtctaaagatgttctttcaaggagagtctgaaaattgtcaaaattcgtatttatggatcttatattttgtgtgagtattttaagatagtattggggcttatcaataaaagagtgacagttttctgggttgcactgatggacatttgagatagagaattggtcaatggttttatttaaatttataatgttacttgacattttgtattaataataaagagggtctaagttttagttctttagttcttatattgtttattagggactgcgatcgttttagtatttttgtgactaaaggtgtgattgtggctttgtgttcatgtaattggtataagtgtaattcatcaacacagtggaataggtataaattatatgtggtgttgatgtatcggtatgtgttttgtgagtgtgagtgtgaatgtgctgtgtatgaatgtaatgagtaaagtgtattgttagtgttgttgtactggtatgcgttgtgtgagtgtgctttggttttgtgtgagtgtgagtttactttgcgcgtaactataataataacaaacattaatagataaactatgaataaaatatatatcaaagtgtttcttaagttaattaaacatttgaggcaaaaacagaacaatagaaaattaataaaattatatgttttactaccaaataatagtcaggctgcgctgttcgtgggcaagcgttgttcttcgttggcctgtaactttttcaggtcagactcagagtcaatcctggtgcagctcgctccttccttcttcctcaggtacaccttgttattgtttgtccagcagaaagtgtagccgtatgtcttagcaaaatctctcgctagataaaacagtctcttggtattgactgttagactttcggcaatatagaccggggaatcaggtccgtctaggttcatggttttagtggtcagtcgctgtt

SEQ ID NO: 694 - DNA, 2596 bp, Plutella xylostella
ccaactaaacaattttgaaaaacttaagaaaataaatatacctatgcagaagtaaagttgacccgactattactctctattactacgtgaatatacctactatgtgaatacttttagccgactgtaccacaacaaaagttgcactctgtacttatagttaaacgatcgaccacaaattgacccaaatcgggcagcgtttcacagttgtcgctcacaaagcgttgtaattacaccgagcagcggcagcggccggccgcatcacgcgcaatcacacccatcctgcacttttacaatagcagtcgctgcaaccgcttacaacacgcgaataaaatgataaatacaattttcataacgatgtgtctcatcacagccgcagtggcacagtcgaacggtgaattctggtggctcaacgatcacgtcaaaaagctacacggagcagacatcccgccggctaaattcgaacaactcaatcaatacgacaacgatgaaaatgataaagtggtgttcggtaatgatatagaaatcaaagagcacaaattagccagggaaagaaataagaatgacgttattgagctgcactttccacatcctgataaattggtttcgacgcaacatgtgaataacaatgaaattattggtaattatgaactgaacagtagtaacgctatgaaatatggtttgaatgttactgaaagacataatgatgaattccgatttcactttcctgatgattccgaaatatggaatgataataacaacaagtcaagccaacttatagatgccgctccaactgatgttaatgaagaaatacattttaagcccagtgaagaggaaattggatatgctgaaagcatttgttcgtatttagaagaaaaacagtgtcgacaaaaagatggatttatttacaaagacacaaaacggtcaaaaaagcctgaattagcctccaacaaaaaacaactggtttgttgcatcctaccactgaaagtagaaccgaaaaagccaagtctagtatttcctgaaacgcgggctaggattgtattccgatataaacgctccaatactgatgaccgggccctgaatcagagaaaaaacattctcgatcggaggttctattcacaataccaaaacttcgttccgattacccaaagtcacgtaaccaaaagaatagtaacccatgatgatgactatgaagatccttatgcaaatattaaaaacatcgctttcaaaactccggtaactccatttaagaaaaggccttttactacatcaacttttggctacaatgactatgatgatacttccgaagattatgccgatgaactgcccaagcctggacttataggattatattccgatcatgggaatcctggatcttggatgtttgtgaataacgatgatgatgatgataacgttggagatgaatatgatgattttggatatggggcttcagtttctacagtggacccgcgattagatcggctaggacctaaacctacccagattcccaatagacgcaagaccccatcaaagtatacaagtacatccgaagaaaccgattaccgatctggcagtgaaacaattagttatcagtcgaatccagactttaaacttctgcaaggcttcaagcttttaaacttagtaaggaataaaagtcggatctatacaaagaattcaagaaagtcatccacggaaagtgtagtaagtgaagatggtccggaatctttgctagacaatgttggaggtgacacaacttcaacagattttgaagatttgcatgatctggacaagcaagtgttcaaagaatgtggaaaagtttctaagcagaaagtttacactggtgcagagactcgctcgagctggctgctgctggtgggccggcgccgccgcccgcgctgccacgccgcgctgctgcacccccgcgctgcactcactgccgctagctgcgtttatggcgcagcgtccggggagctagtagtctacgccggcgtgtgggatctcgctgaagacactcagaggcagggtcaacagagactggcgtccgcgcacgtacaccctcggtatagagagaatgatgtcgcccatgacctggctgttctgcattggagccggccgctgcgcctaggcccgtcggtgcagccggcctgcctcggcgagccacacgtcggcgacagttgctctttcgtcggctggggagggcagggcaaagcactgaaccccaggccgcgcacacagcgagcgtcaatagtctccgtgcgagagtgcagcagttgcctccaccgccaccagggggcgcgcatgccgagcgacgctttctgcgccactgtggactcgccgggctgtgtgacgagtacaggcggttcactaatatgcaacacgaatggacgacaaacttcagtgggcgtggtcgtatggcgagagggctgtgacgtcacttcccctgtcgtgcttctgccggcgcgtgattgggtgagacgagccctttccggtttaggtattatttaagaatatttttttgagtttattgttcactgccagtatttttatacactattgttataatgccaagatagcatttggataaagaaaataaaagtta

SEQ ID NO: 695 - DNA, 3022 bp, Plutella xylostella
atttttttgtttaatttttttgtggttttttgtgtgttgtgggggggttgggttggtggggggggtgggggggtgttttttttttattttttttttttttttgtaaaaatcacatttatttcataatacttataaataacaattaaatataaacctaagtctgatctagcacagcttcaagaccttgtctttatttagtttatttgtattttattaatatttttgactaaatcgaggaagtaggttgtgtgtataatctctgaaatcataatacattgaacatcgcaaactcccttcaggtaatacttagtcacagaaatcatttcagaaattcgaggtatttacatgcaggttgatgttttatcagtgaaacgaccactactgattagtagacaaattaacatactgataaaattccatcgaaaaaagtcatgactcatgagtgaattaagaccgctgtcaatgtaggtattacccctgcagataaataaacaatacgaaaatgggggtattgccagacataaggacgagatagcatgggttcgttcgagattttcatatagattctttatctgcgagcgttatacatgaaggaatcagtttccgactgacgaagaggctaatctacaggatgttgcaaaaaggtagtaagccgaaagggggtgactgtgggtcatttctccaacaactattgtcctgcgccaccatcccacttcttactacacccaattttttaccaccctgcataagtacccacacaatcctcttctcctcagcgagaacgagagagaaacctgcaacctcccccgtacctccacactcactcagtcatctcctcagtgggtagatatcacgaggaggtgggtagtagaggcgccttcatgggcgcgagtgctccgtataggttcgtgacggccgtgtggaccatcttctctagagtgtcgtcttcggggcatttcacctccagggtggcgaggtccacgacggcggtggcgccgttcacggtgacgggcagcttgtcccccttcagcatcttgggcacggcctcttcaccgaacatctcctgaagcatctccagcacgcactccttgaagtgcatccggtcgagcttgggcgcgagcggcaggtgcttgggcgcgggctgcagcgacgcggacaggatgcccgccacgagggcgtccgcgtacatgtccgtcacgggctgagccacccactcaagcgtaacaacactattctcgatggtacagtcgatgcacccgtagaggcgacacttggtctcactcgagaactccactcgagggcacagttgcagcagcacgtggcgtagaagcggtaaagagcccccgtagtgcagggattggcgctgcgtcacttctgtttgggttagttctgtgtatttattcaagtcctcaggcgccagtatgtggtagttgaagttccgcttgacgaggatcccgtgcagctccgcgcccggctccggcgccgtcatggccagcgaacccattaccttggcagtcttgtctccgcggaagctgaggctgagcacctgcgtgttgcgcggcgtgtgtatcgcgagggcgccgcggtgctcgcgctgtagggccgccttcaggcgggacatctcgttctgttcgccgtggactagcacaacatgcggcggcttcaatatgttaataaactcggaggtctgttggtagtccgtgtgagccgagaacgatatgtagtctactgacatcttgagaggcagcttctgtcccgacatggaggtgatctcttcaggctccgacaggatcgtcttggcgagcgtgccttctacgcagtaaccagcaataatgactccgttcttggggtcggtgcaccagcactcgaacagctcccgcgacagccccgactgcatcataccaggcgacgccatgatcacgcacgggcctatgtcctcgaagtggtctatacccttaagattcgatatatgcttgaatatgaacgggttattcagcgcgatctgcctccgtatcttctcgttcatggcgttgacgtaggtctggtacaccgccatgcactttttggccagcgacgacgcgtagtagatcgggatgtcttgtagttcggggtggagcgaccagtactcgtccagtatgagcagcagctcctgggcccgtccgagcgcgaacacggggatgaggcagcggccgccgcgcgacacgatgtcgctcacgagcgacgtgaagcgggactcgcgctcctcgcgcttttcgtggatgtgagtgccgtaggtggactccgtgatgaggacatcagggtgcacggtggggatctccgccgccatcagatgccggtcctcttgccgggagaagtcaccagtatataacaccttaacgccagcaatctctatcatgaacatggcggcgcccagcacgtggcccgcgttgtaggcccagaaccgcaccccgcgcacgtcccgctcctcgtggaagttgatggtctcgatgcgctccatagagctttctagctcggattcggtgtatagcatttgttctgtggatatgttgctaactttgatgtaatcagagacgagccaccggtagatggccttggtggcgtgtgtcatgaatacgcgccccttgaacgaggtcttggtgaggaaccacggcagcgccccgctgtggtccaggtggaaatgtgagataagcagcaggtccacttcatctgcctcaatcaggtccacgaagggcagagcatccatccctgagagcccggggtgaatgccgcagtccaacattatctttttccccttgaactccaacataatacatgatcgtccaacttcttggccagcgcctaaaggtctgatggtcaattgatcgctttcttccactggcacggggtcggtaccccttctaggattcgtcgtcattgctctacagaagtaattatactattatcaaccagatatcatgcgtggtattatgtttaaaatattgaaaaccaaattcatttataaacaacaaccggccacaaacaa

SEQ ID NO: 696 - DNA, 2059 bp, Plutella xylostella
tttttttcaaaccacagcacccacagtaaacaaaaccatgaatccaaactacctatatctaaactaaacacaatattttatcagacacatgtctatgagcagcattgaggctactcgctcaaaaccttcacgaattcatagaggaaacaccaatatgattattccactggcctcaactcgactacctacactatgaagctatcctcaacataaaaataaagattcaacgacgagctggttcgacgtaggtatacttatattatatgtaacgaccgaaggaaacaacgaacttaccttctttctgtgccttcgtgtaatgatttcagaatagtagttaattgtattccttatttactgtgaggtcccagcaagacagtttaataataccaatcttaacgatcttctaaacggtatacaaaaactcaagaacaagttgaaaatgactacaatcatggcatgctatagcatagtaacggaaaaagttattaatgacgataatttggctgatgcaacattgaaattgatgtctacaacaccactttatgagaaagtcatgtatgtttatgacttgatggagtcaatacaagcttttccacctttacgtgaagttaaaaagaattccaaagtatctgatgactatcgaaataaaggaaatatatgcttacagaataaaaaacattatgaggcgtggcagtactataacctttctctgctccatgctccattagagtcgaaaagctatatccttgctttagctaatagatctgccgtattttgtgcgttgaagaaatataaatcttgtctcgaagatatagaagtcatattctcaatgaattgccctaaggaagtgaaagaaatattaattaatcgaaaattgcaatgtcagaagatgctaccttcggaaaatcaatataaagaagaggattattctcatattttccggttgttgtgccaacggaatactagatatccatgtgctagcgaaaaagttcatgtacagtgtagtaaagaaatgggtaggcatcttgtggcatcagaagatatcaaagcaggagaagttcttatcacagaaaaaccatactgtaagattgtattgagaaatcagagattattttgctgtagttactgtctcgcaacggcggataacataagcccgtgcgactactgttgttttgatctctactgtagtcgtgaatgcaaaactgccgcttgggacgcttttcactctgttgagtgccctataacggcctcgttggtggacctacaatttaataatattgagttgctagctctccgaacagtaatcaaggctcgaaccgatcataaggactggggtagtttaattaaaacaatagaagacacggaggctttaacagatacgaaacttcggggtcatgtggaagttgaaccgggaaagtgggtttatgatgccaagcactacgcttcagtacatgctttgtgtactaacatagagaagcgcgacgtcctagatatgatggacaagtgtgttacggctgcagtgtttctctacatgctaacaaatatgaccacattctttaaatccgaagacatgcaaaacattgataaagtccgtcaaactgtcgctgagctgctttgtttgcattgcatgacgagccccacaaatgcacacactattgacacgtacattcaaacccgggacggatactttgaggaagaattgcgcatcggcagcgcctttttcccagtgctgagcctctgcaaccactcctgctctcagaacgtcaccagatacaaccggctcagctcaggggaaatcacgctgttagcagtcagacctattaagaaaggcgagcagctgtttgatacatatggattccaccacgcagtagacagcaggacatcacgtcaagctaccttattgaaccagtacatgttcacatgcaactgtgccgcatgcgtcaacgactggccgcatttcacccgcctcaaaccttccaaaaacatccccaagccattactgaaatacaaaaagcttctcctcagtaaagagaccatgagaaagttggaaaagggcacg

SEQ ID NO: 697 - DNA, 581 bp, Plutella xylostella
ggagttctaaacaaatcttctaccaggtgaaaacaaatataaaaatattaaaaattataaaccattctgtaaaactaaaaaacatttcttcttattaatttattttaggacatcagtttcttctcttactatacctaaacaatggaatcctgcaaagtcgactgcgcccactgccagcgctcggtggaggggtgcgcgagtatcaagtgcagcctgtgctgctcccagttccacctggagtgcctcggcagtggcctgcccccctccaactcctggcgctgcaggaggtgcagccagtgtgaacaggccctaacaccgcaagcgctcgagtctactgtagttcgtgcttaagaattttctagtgtcttttgactgtatcgtttgtaataaatattaagtggatgttttaattttggttttttattttgttttggatggatgggttactgactggttactttggataggaataggaataggtaggtattgatagtgaatctgagtgaatcctttcccttcctggaaaagtctcgtaccattgcaaaggaaagtcaaaagcactgactcgaaatagcccaatg

SEQ ID NO: 698 - DNA, 664 bp, Plutella xylostella
tattgacctgctagcaaagaaaagaacaacaaaattattcgaaaattgacaagtggagggactgtcacgctttgatcctaatttttgacaaaaaaccaaattttatgtaaaaaatgaattaagaaaaatagttgtgaaattatgtgttattcaaaattgacaccgaaatttcgtaagctataaaggcttacctcggtgtccttacgattacgattgaggattggactgacaaaatacaagagcggaaccctcgggactctggtttcccgatcgtagtcaaaaagagaaaaaataacagaccaaaccaacatgatttgtatgtccatgtgtacgatgattgctgcggcttcggtactggcgtgtttccccgtcatcaacaaacacttgaagctacaaaagatattgaattgtctgaagggcaaatcgtagtttcaccgatacgagatgatcgtttgttatataccaattattataagcccaacggttatcctcgttataagctgcagttgtatcctcttgacgacagtgctatataactgctggccatgtattaagatctctatgattgagaacaagccgcaagagcctgaaaaacctaagacaatgccacgcttttattattaattttgtgtgtttatgtgaataaagtacctctacacaaaca

SEQ ID NO: 699 - DNA, 778 bp, Plutella xylostella
taggattttcggaaatcttgtgatctgacccaagatcctgggattcttgaattgggaaaaataatcttgcgtgtctgtttcatacaaaaacacttcattactgacgcgatccgtatctttggtgtaggggtgtcccgtgatccggctcaagatactttattaaataagtacctaccatgataattatcataattgttttatgagtctttttgattataaattttgtgaccaaaagttgtgtaacgggaagccactggatgcagatggcgggtgaccgtttggggtggcgatcgttaggagaggcctatgtccaacagtggactacagaaggctgagagagagagagagagaggcttgactacctggtagccatgtccaattgaatacactattaattctaaatcaattagattggtcgaaattcatttaagaagttatgacttctaaatatgattagattttcgttgtatggacctgtaatttaaaaactgatttctcaatcagacatcaagtttttttatcctacagataacttttattcagaaccaatcaaacaggcacgaattgtttcacttatattagttacgttatttcttaatgataaaggatgtttctaacttcggttaagttattccaatacaacgtgtacctatccataaaatataggtacttactcccgaaaatccaaagagtaaaatgactgcaacatttcctctaggcgcgctcgaagagacgacaacgaagaagccggccgtccccacgatctacatcgccaagt

SEQ ID NO: 700 - DNA, 2784 bp, Plutella xylostella
gtgagcgcggtactctgtggcagtccgcagtgcatcggaggccggcgcgcgcgacgcacgacgctcgtaccccctcgtctgtctcgctacgagcgtaaaagaaaagttgcgatcgccgcgcgggaaacaagtgaacgttttgcatctcggttattggacttttaagtgatttgttgtcgttgtttcgtatggaaagagttggattttatgttgaatggtcaatgaacggtattcctgttgccgcgaatatttagatcaagtggtcggattgtgcaatacgtgacagtgtcggatcgcgtaaagagatcgagtgaaagttgatcagtgtcgcggcgcgtccagcggagccctaacaatggagcacctgttccggcagcggcggctctccgtacccaagaggacgagcgagctggtggccctgctggcggtgtcctgtaccctgttcctgttcctccacacgcgagacctcagcaccaagctgcgccgcatggagggcaagctcaacgatgacgtcaccgccttcaaccacctcactgaccgcgcacagacggaccgcacggagcacggatatgcgtctgcgcaggagtacaagcaggtgctggaggccatacgcagggagaccaacgcggggggagagcgcgccaagccacagcgcacactcgaggccgaatctgaagagaacgagctggacgccaccctggctgagccaccggagtccccggagcttgtcccctcggcgtggcagctcaacaacacggcgcgggccggcatggagctgctgttcttcaatagggtgcccaaggttggcagccagaccttcatggagctgcttaggagactcgcgctgaggaataagtttgggttccaccgcgacacggtgcagcgcgtggagacgatccgcctggcgccggcggaccagcaggcgctggcgggccacgtcgcggcgcacgacccgccagactcgtacatcaagcacgtctgctatactaactttaccaggtacgggtacccggctcccatctacgtgaacgtggtgcgagacccggtggagagagtcatctcgtggtactactacgtgcgagcaccctggtactacgtggagaggaagcgcgccttccccgacctgccgctgcctgaccccgcctggctgaagaaggacttcgagacatgcgtgctgagcggcgaccgcgagtgccggtacgtgcagggcgagactcacgagggcatcggcgaccaccgccggcagacgctgttcttctgcggacacgagcccgagtgcactccgttcaacagtgcggaagcgctgcagcgcgccaagcgcgtggttgaacaggagtacgcggtggtgggcgtgctggaggacatgaactccacgctcacggcgctcgagcgctacatcccgcgcttcttcacgggcgccgccaagctgtactgggaacaactgaacacattcaaccgcatcaaccgcaacgcgttcaagccgccggtctcggaggcggtcaaggacatcgtgcgcgccaacttcaccagggaaattgagttctacgagttctgcaagcagaggctgcacctgcagctgaaggctctcaaggaccccaccatcaccctccccggcacacgcctccccacaacctccggcagaagcctgagaaagaggagggcgcaaagacgacgcggcgtttaaaataacaaatgagcacgatttgtgaacttgacttttctccaccgttttgtgagtgttttgttttatagtgaggtcttcagtgtgcgaaagtgacgccctctgtgttaaaagtgatgaagctaaatgtcgagtgaggttcccgttttcaccgcaagatggcgggactaatggggataagagggataactggacattgaataaaatctgaaagaagtttgttattactgctataaaattaatagcttagaagaattcaaaggttctaaaggttacaaagtacggtcacttattaaacaaaaatttgggcacagcgcgagcggtagcgaagtttgttaatttgtagataactatgtcaagactatttattgaataataagtttagttaagaagataaaataataattttgaagatgtggatgcagtaaatgtaatgcacatctgccttcaccatgaaaggttttccaggcatcagtgctttcagttttgttattttagaacatagaatattacatgcttcttattactattagtatgcaatatttggataaaattaagaaattttcggaaaggctggaatattaattacttagtaggttttgcgcattttataaggtataaaggaaactacagtagaaccgaattattatggccgagcctttcagaaactgcttattttataattaggtatgtagttttattaaatttatttgttttgttaaaatctagatgtctttcagatagaggcttcaagatttaatacttaagtttgcaaaatatttaaataaaaaatctaatttattgtttagtgaagttgaactgaaaacatcattccatgaaatgtgatatatgttgccttttgtacatattgtaaaataattagattattttcttgtaagtgaaaataggttacctaagtacataagatctatgtaacttagtagtacatatgtctatagttttaaggtctacaaaatgctgagttggaactaaatacttacttagctgctaattttaaatcattttgcgttgtttttttactaacactatttgccgagaaatctcaataaacgagtttgatgaacaaaaaaaaaaaaaaaaaa

SEQ ID NO: 701 - DNA, 826 bp, Plutella xylostella
atttttactgttcctaagccaaatgggaaacacagatttattttaattatcaattaataaatttagtactgcaatatgttacataaatagaatgggtggtgtgcaacacacacatttaaataatatagcccgtgatatatggcagtggtgtgaagttcgcggcctattcgtttttgcatcttatgtaaagtcacctgacaatgttgctgattacggttcacgtttaattaatgtcgatacagtatgggaactggctgattatgcatttacccagattgagaattgttttggtattcttgaatttgatttgtttgcgagtgtacaaaatgcgaagtacccaagatattcgtcttggaaacacgaccctgatgcagaattaatagatgcttttacttttagttggcaaagcctgaacttttacgcgtttcccccctttagcttagtagcaagagtactacaaaaaatcttatctgacaaagcaaatggggttttagtggttcctatgtggccatcacaagcatggtatcccctgtggtctagattaatcgtatcaaaaaaaaaaaaaaaaacttgtatttcaaccaagtgagcatctattattctctcctttcaggaactatcatccattacatgcgaatcttaccctggtggcagcgagattatcagggaatcgctaaaacatcgtggtgttccaccagaatccctagatatagttctagcatcttttgctaaaaatacaatttctcaatatacctaattcgagtttaaagaactggtggaatttttgtattggaatcgcattaatgtttatgaatcgtcaccaata

SEQ ID NO: 702 - DNA, 1709 bp, Plutella xylostella
ctcacgtggtgtagggttacaaaaccactcatagggctccgcacaccgcataacaatattggtatcggctgttgtaatttaaaacggacattataaatactagtggcgctggctggtgtagctgacttgtgtagtgagcgcgccggctgacagtgcaaagagcgggaaaagtttgacgtttcgagaaccgtttacgaagaaggcttgtgttcatcaatcaagatgattgtattaaagataacccttctcacggcgtgcttggcagcagcatcagctcagcagtacgcgcccaccaccacccccgtgccaatcctgaagcagatcaacaaacagaacgacgacggctcttacagcttcggctatgaagctgctgatgggtcgttcaagatcgagaccaagtaccccaatggcgatgtggccgggaagtacggatatgtggatgctgaagggaagaccagggaagtgtcgtatggagctggcagtaaacgagggttcgagccgcaaggaaccggcatcatggtgcctccgccgaccctgaatgaccctcccaccaacgcgctcaccgacggacaggaggacgacgggcagtaccgggaagaccccagcatttatgaggaccccaagtacaatagtcgcagccagaagtcacgaccgggccaggggttcaggtcgtaccagactgagccgcaataccagacgcaggtccagcaacctgcccagccgaggtatcaaccccaaccacaaccacaaccgcagccaaacttccaagattccttcttcagccagtctccccagcagttcccgaggccccagtctcaggtctaccaccagcagccccagttctcgtaccaagcgtacacgccacagcagaactaccaaccccagcagagtttccagccccagccgacgtatcaaccccagccgacgtaccaaccccagcaggcgtaccaaccccaacaggcgtatcaaccccagtatcagaactaccagaatcacaatcccttcttgggtcaccccgctactaactttgacccttcaacgggatcttataccatcaactttactggatagtttttagttgttgaagcgtagactgtaaacatcttattgttaaaaaagataattctaagctgaggttctacgatttaaaaaggaatggtaaagaatgcaaatgtgaagagaataagcggttaacttttttaagaataaaataaatgtacaaatatattttttactggctggttttttactaagtaggtattagttcatttttattttgttacgactagtcaatactttttttaaacgtagtttttagttttattttttgttaactaacataactttcctgaagtaacaacgcaccctatttattgatgtagtgatattttcatccatttaaatctaattattgtatgtaaacttatcaatttaagtctaaatttaatgttttttaggctttttaaatatattatacacgacactaaacattaagacgacaacttcaactacggaaatcaatgaaacattgagtgtaatttattacattcatacaaaaaatcatcaaaagtaagttgtaattactaaagctcattctgatattttagtatgtttcatcctactgtactgtactatactgcacttatatcaatttaactaacactttctaccttgattcatgtatttctttacgagttcgcctttaccta

SEQ ID NO: 703 - DNA, 982 bp, Plutella xylostella
taatgtgtgtatctacctatctgtgtagataataatatcagctgtccgatacccatattacaggctctgcctagcttggggtcggatggtcgtatgtgagatgttcccacataattagtacctataatgattattgtaactttaatggcttctgaatacgaagccaaatggcaccgctatgttaagtctattgctgtcttgtcgtgcgggctattatgtcgataagttagtttatgtcggtaggtatatctacatagtgttttgtaattaagctattgttacttattttagtgccaacatacctttttctattttaaaaactagtttggtaaaattttggtacgtaagtacttctccaaaaacgatatttgccaaagaaacagtaaaatgatgtaactacatattctacatcattaactttaatcatatgaagatgtttaaaagttcagatatttaatctgtttgtttgtattgcttttttacaattgatgaacttcttaaaaaagttattaagtattggtctattctatagttattattgtactacctacataaatttaataatgttattaattagcactttgagcgaaaggggcacatttcacgaaatggagttaagtataatgatagataaacttaaacatacttaaaaatacttaagtacttgcttacctatggtttttatacgatcacgaaagcgagaaaataaacataaactagctctgcactcatgcgatagcttctttctatgattaactgaactccgtgaaaaatttgagatatgcccctttcattctgaaggtgtttgtagtaagcaaattatggctgtgttagattaatatctcccatgtttgaaatttgtatgagtatttgataaattaatgataaaatgtagctttgaatgtaattatgaatttgtcttacattcatgacagtgtttgaaataaattaactgaaatattgaaaaaaaaaaaaaaaaaca

SEQ ID NO: 704 - DNA, 2022 bp, Plutella xylostella
ttttttttttttgggattatgttttgatttgaactttgtttacttttatttataatttctgaagtttttatttgctaagatttacacaatacttaagtgatatttaacatacattaacaatgaacgagacggcattatacttatccactctaaccaaagagatgaagcgttcatacgaaacgcccgtgatcctgttgactggagtcgacttcggagactcggtctatacggtcctgaccgagacgcgggagtgttcagtgcgaggcggagaaccagaccgtgtcgccgacctggtcaccagcttccatcacgactggctgaaggccaccgcagatctccccgcttataggttacaccttcgcgataagcctcgacacattatctacgaagcaatagagcaaactatcgcgagcgccaggaatcgctacccccgcttcaaagtttacatcgaaaaccttctagactatgtctctgaggctgatagaggtatcatcgaagctgatgttaaagtcattgaagatatgcacgaaaatgttgtgagtgttttacaggagaagcgagcacagttacaaaatttagctgatcatgaggagtttattaacaaaattgaattcgaaatagatgaactgctgaattggttagacagaatctacgataatctttctgtacaaatttgtaaaattattaatcttgatgtaacgtttataaaggatttgacgaaaacattaaacgaaatacttgcagaagtatccgtttctgatgaagatgaaacaataaaaaacatttctgaaatggaggacaaaggtgtagctcttaaatctaccatacgtacaaactctacttgcgatttagagatcacaacagtattaaataaaataaaagtgttagaagaacgaattgcgagactccgagataacagctcagctgcggtgacggcattacaacacaagaaaatataccttgaaggatacctgagggaactacaacagctaaaaacatcgatgcataaactgcaacttgcatcatccctttccgataaaatagtttctcccattgtatcaatcactgatgcacaaagggacaacaaagatgttcaaatctttaatcatttgttgccagaggtacagcgctatcgactagtagacaaattagtaaacttatggagggacgctatttacggtcaacgccgacgaaaatctgttataacaattttgagtgccggcgacataagagaacagttttccgatgaccacggactggatagattggggagaaaactcgttaataacccaggatctagcagtgttcaccaaattaatgagaaaggggaccgccgtgtctatttctacgacgagttgagccataaagtggaccgaaactcaagtgagtattttctaagtggcactacgtattgcaacgatgatcttggtggatatttggacgataaatatgagcaaaaagacatgattttggacagctttcataattttgtgttgaaaagaaacgtaggatacgaacctatgtgcgaatgcgcgcctctgcccctcttgacagaggcaagccaatatttgaaacaaaccgttagtaaagcgcttaaagaatgtttagcggatgttatactgcacacaccacaagacccaattatttacttggccgaacgtttggagaagtacagacaaaatattcagctgaccgaaaaaagtacagaagaaaaagaaacgctctcagcagctagaaaacaaattatagcagttagggttaactctacaagcagcagagaagcttattcaggaactgacgttaactttgttaactatagaagatcgtacagtgaaataattgatgatttaggtactttaatgcatgtaaccaccttggacagttcatgtatttaatccctactctcgtgactcgtcagtgcatttttaagtttttgagtgcttatagtttatccccatttttatttatagctatttattgatattttatttttgttttattcatacctactcttggcaagag

SEQ ID NO: 705 - DNA, 712 bp, Plutella xylostella
ttttttttttcttttgacagctttctgttttatatacctacctaatgaatggcaaaactaaatttatttacagttaaattcaaatttaaagttatgaaatgtttacaagaacttcaaaactttaataatggtcctaaaagggtcctgtgttaaaattaaccaggcgctattgtatattttggtttggagttcgttgatgtatcaagtgtcaacactattgtgctaccagacggcgtgcgctggctgcaagcagggcgaccgtcggacgcgggcgagaagcacggtcgactgtagcaacgcagcccgtgctgacgtcaactggatcctgcgcgacagggtcgtcggcaacaagttccctaagaaacctgacaagccgatgtgcttgttcttttatgcgcatgtgggttaccgctacgacgtggtgcgggggtgtgtcggcgaactcgaagacgccatcacggcctgcgagagcatgaaggcacacgtgaggaagaacgaccgctacaactacgcccgctgcaacatatgccgcggtgacagatgcaataacacgaatagggttgtcacgcattatgcgctactgtgggttttgtttgggatgttgtgtttgtgtcgttaggtgaaaatttgatcggtgttattattgtgaaagtgttgtttttggaataaaattttacgatgatatagagaaaaaaaaaaaaaaaaaaaaaaa

SEQ ID NO: 706 - DNA, 3718 bp, Plutella xylostella
agcactcctcacattacttcagatatccataagtggtgcgtgtcgcaagaagcgcacctgcccccgcgggggcgggcccggccggcaaggcaggagccgcgggggctgcagggggcacggggggcgcagccgctggcggggacaaggacaagacaggagccaagggtaaaaaaactactgaatctgtagcatcatcgccgataccaagggtagaaactaaggagtcgaaacagcagacggcgacgccgccggccgcggggactccaccggtcaagaaggaggacaccaaaaaggaagacgtaactaaagctaagacagattcggcagcatcgctaaaaaaatctattgaatcggactcggttacattatcatctcaatgtgtggtgaaagaatgtacaccacgattccaaaaaatcacaccaaaaattaagaaacttgaagttaaaccaaaaattattgaggaaagttcagatgaatcagaaactgcatctttaaatgataaatgtgacggtaaatgcttaaaagatatcgtggaggaatctgacgacgaagaagaagaaacacatgtagattgtacaaaaaaatgcaagaaaccctttttcaagtggttttgttgtaaacgaaaagaaaatgattccgttaaatgcacacgcaagtgcgataagaaacctaaagagaaggagtttgataaatgcaaaaaacagtgcgatgtaaaacctgaaaaggagtttgataaatgtaaaaagcagtgcgatgtaaaacccgagaaggagtttgataagtgtagccgacagtgcgtggagtctgacgacgaggaccacgaccagtgcgtctcgcagtgcgaggaggacgaggttgatgacattgatgagtgtgtccagaagtgcgagaaaacttggtggtccgcgttattataatacaactatgactttcaactttatagtcgatttgtttaattgaataagagccaccgaaagctgacacagtgaagaaggatccctcaaaacaagacttgacggaaactaaaggagcaaagtcaccttcagctgggcctggtggaaacaaacctaaaaagtctccatccaagggatcttctatacctaaaaagtccgatgatttaccgacttcaaaatctaagaggagatggttcagataggtggttgtgtgtctggcaggtctcggaggaactctatagaacggataagaccccctcctcgttctcttgcgaagacagcgggattatgatcgagatcagtaacgcttcgttggccgagcggctctgtcgagtggttgatctaactgggccgccgactcctgagcgtaaaccgttacgatttgccaaaaaaaacgcaagaaatttcataagaatgttgattcatagacaaccaaaaaatatcgattgttcagtttgaaacaaaaatgtataactccgagtccagtaagagggaaccggcgccatcatcgcagagaccaaaagaagatgttaacgtaataaagtacgacggcggcggcggcgcggtgccggggccgcctgaggggcgtcccacggcgccgggggggtacgaggggcgtcccacggcgaaggctggtcccacgcgtgcccgggacccgcactgccgcgcgcgctgtctggggtgcaagatcggcgcgctgcctactgtcagtgaactatacaagattccggagaaaagcgacgacaagtgcactgtgtgttcctccaaatgcttggggaagaggatcggggcgtttgtatcgaaattcgatgatgaaggaaatcgcatagaaaatccaaagaagattaagtcatgtccactgaaggataccattttcagtctggatctcctccggtcactgtatacttcctttgctagaacctcgaagaaaattcaagagttgaatgaatacgatggagcagatgctacagaagtgacaaatgaggagcaatctcaagagtcccccgcgcccgcgccccgggagccctgtcactgcggccggcgccgcgtcgcctcctccagagatggcttcctcggcattagcttcgatgaagacttttgtgtgaaagcctgtgactgcgatggtggagtatcctatgaagtccatgaaataattgagcctaagaagaaaacttttaacgaacgtctttcggaattcctagaatttgagcctaaaaacccgaaaaccaaaccggaagtttctgtggcatctctacagaaagcagaaaagaaggaccaacagaaagagaaagagatggaggcggagagagagagactactcaaagagatgcaagagaaagagaaaaaatatttttagatacttgaattaaaatggctgcagttgagagtatgaccgaggtggccgcgaaggtcccacagattacctcgaatatgaccgtcaagtcaagagaatcagaagacctagtaaagggtaaagtgcgagatacaccatctgaaataccaccattagaatccgcgggagatgaaaacccttaccctgaacccgaccctaatatgtttaaaaagaaccgtaaaccgaagcggaaaacggtgacaattgatgattcagacttgtgctcgaaggaatgcatggggtacaaattaggaacgctgtattcaaagtttaatggtgatgaaaataatataaggacgaagtgcaaagactgtcctgacacatgtatgggacacaaagtgggcaagtttgcagctgaacttgacgcccccgagggctccgccggggctccgctggacacgccgtgcgccggcggcaccttcgccgacttgttcgacacactcagatgtctattctcggctctaatattccaagagaaagaacaagagaataaggaactgaggaaggaggagttgttggccaagagatccgccggcaccgcgccggacgcggccgaggagcctcacacagaacatcgggcaatcgacgcggataaagattttactccgtgtttttgcaagcgacgtcgcgtcgtatccagcccggatggactcatacaatttaagatgaacgatgactattgcctgaaagtgtgtgattgtgtcgatgatgagcctgagcctgaggaggaggtaaaaaaagaaccaacaaaatgtgataaattcaaggagcaatttttcaaaactaacaaagatttccagaaatggagacgacaaagaaatgcacaaacagacataatgagagaaaagatgggaaaagtctacaaaagagaatccgctgttgcgaagaaaaaaatgaggaaaaaatttaaagaaacgtctaaaaaggcaaagaaatcatttaaaaaagcttcaaagaaagcgaaggcaaaagtaaaaaaacgagctaaagacacgaagaagaggatcagaaacaaagctgcgaatataagaggagacaaggcgcccaaggaaggtgacggattaagtttaagggatctgaaagacataatttgttcatcaacctcatcgttgaccgccaaggctaaaaagcacaacgaagaattcaaagccagaagagaagcccaggcagaagaatatcaaagaaagatggagacactccgagagctcactccgaaacaagtcaagaatccatgcgcctgcaagcagatggagaaaatcttgcaagagtatgatctacggaaatctggcttagtggatccaaatacagaccagacagaaacgccagacactgaccagacagaaacgctagacactgaccaggcagaaacgcc

SEQ ID NO: 707 - DNA, 579 bp, Plutella xylostella
ttttaatgatacggcgaccaccgagatctacacatagaggcacactctttccctacacgacgctcttccgatcttgtatattaacagagtgaagagcaaaggggtcattgtaaaactataataatgcagtccacttcattaaatagtaggtataataccatttgtaacttcactcacaaaccgtccataggcgttctgctcactgctagagtcgagtcgaggcggtatcaatggtagcgtggcgatgatggctttaaagctgcgtacagaccggcccaacgaacgccaacgaacgggtttcgttgaccttcgttgctgcaatctgccctgtattatgtatgataaatatccatcgttgggggttcgttggacgttcgttgggccgggctgaacgcagctttatattatggcgtgacatctttgaacgctatacaagattgaataaaattgagaggccaaaaagagtagttttaattttatttgctgagaatcagtctattgctatcgtatagtttattttgtaaatgcctacaagtgactgaaatataccatgttatttatgttgtaataaataaggcg

SEQ ID NO: 708 - DNA, 1742 bp, Plutella xylostella
tagaaatggttaagtttcggataatgcattgtagggttcaatcgactggaagtgccttcctctatcacttcctgaagggatccggtctacttaccaataaccctgtatattccttgtgattcccaagaagaaggactttattgtctattcctcacaaaatatgaaacaaaaacaaaccaaaatttgtcagtgtgcgtcaatgtcatgcaaataaaaatgaatcatcaaatctgaaagcaaaaaatcccgtaaatatttcaccatgttcaaacccattacatcacattaatgcagtgaaccaaataacagcagccaaaatgaacgaagaagtaatagttggtatggcctcatcgaagtccaaaagcaaaaagaagtcatccactaccaatgcaaccaaaccaaaaacgaagcccaagagttttgacgactgtcctcttgccgtgaaggtattcatgggtgtcgtcgtccttgcagccatctatggtctcttcctctactgctccagccgccaccagcaaagatcccgcagacgtaacacatgctgaacaggtcctgatcacttcatccttaaagttgtcatgatacatgtcgatttagtccaagtcttcttgatcgccttcgcttttggctccttgattttcattttgaactggatgtgcaaattctttcgtgggctgcaggtggactgatgtcgaaagagaatagaagataaagataagcaaaattttggggtgaaaacatggaagtttgttcagaagacttattgcagttcagtgcctacctgagtgggtttctgctattcactttagctgcgtattgtttgatacaaaaatactccgacttttccaacagcgctcaaggggactcgccttgtctttaaaggaataaccctacacttgaatagctcctttaactagaaaacgttaaattaacaaattaaaatgttgggcaatatatttccgaagaacgttttatcaattagtgttatcctcacaatattgatcgtatgccttgcaacagcatacgtatggaatgagacaaggaaatgtattcaacaaaataatgttactgaacaaactattccatcgtgacaggaagaataagactgtggcacccaaatatcctttcgaggcatacatgaatgagataagaagccaaatgccttatgtcttatctatgttgaagatgaagtctataaacgttgcacaggcaataaaaaagcaaatgacattcaaagactggatggcgaactcatacgaggaaggtattttggtcggttgcactttgacgcttctctttctgtgctgtgcaagagttttctacttactccacaagatggagactgcggaattagaaccttagtgttcaggatatgaatttcaagttaacagcatggatttagagttgctgtcggcattagatctgccgttgattggaagcgttttcttcatgttaactttgagtgcaatcactatgatatgtcttttattcaaagaggaagctagatccgtggccagatactcttcagctttagtccactacgattggggcgaagactgaaaaaataacaaaatttttaaagtaacaaactatttgcctgtcttatcgattttaaatttcataagatcttataaaataagcttttttttaataaatgtaggtaacacaaatattcaatattttgttttattcaaaaggtagaattgtttgtctcaaaaaggttattggttaggtggtaataa

SEQ ID NO: 709 - DNA, 572 bp, Plutella xylostella
caaatcgtcaagttgattgtacaagcgtcacaaaacgccatcaatgaacgcactagtgatacaaccaaacaggagattcaaccagatgcctacgacatatgtatagttaaatcgaaccagcaaattaactcgcaaccgttacaatggccgggaaataaatgtaatttacaaaaatatatttctaatttgtaaagtataattataaagttcataaaaacataattatcacggcacaaccttctatatgaaaaaaatattacttatttacatttatcctataaaaacataatattattataatacaggattttttagcaggcaccgggccaatgcgtgggattataaagggtgttgttaaaaccttattgtaagtttgacggcagccgtgaagtaagcgtccgcctattggtttcgtacgtatcggaccaaacgaattgtcataaatgtatggagaaacagcgtcggccatgccgataaagtatgaatttctatacaaagaatactgaatgcgattcgtccgttgcgtactatggcgataggtgcacgcttacctttgacattactcacaaata

SEQ ID NO: 710 - DNA, 1330 bp, Plutella xylostella
gtactttacttagcttgatatcgttgctttatatagttggtctatttaaaaaataactatcataacattcttatgattaaaaaagattataacctcaaccacgttgcttcaaagaataaataaacttatatctagatggagaataccgatgctagttcaagtaaagaacctcttactagtacagatgaacctgctaccagtaaagaggataaagaaaaagatacagaaatggaggaagtgtttaaacgaatggaggaacacggcaacaacacagtagataatcttataaaatggatgatagaggcaaagatcgtgatggacaaagcaggagaggaagctgctagggttctatttgaaggtgcagagaaaggcaaggtgaaggcagaagagttcaacgaggtattggaacgaacggcggagcagcagagccgcgacatggatgagttcatgcagcagctcaagacaggtggcaagaagtttctggaagccctaaaggcgggagcgaaggccttcgaagaacacatggagaaacataagaaggaaaaggaaaacaattagatgctaataaaatttgattttgtgatgagatattgttgtttgattgtatatgcggggatgttgagggttgaaaggaggactttaggagcttcgaatcaaagcttatcaaagaaataatttcaataggaacgctgcatacctatcaatctcctgattcggccaagtttcctattatacctactcgtgcttggtgtgccaagtcaacagcattttagttattattctgaacaaaaaagaataggataagtgttgacctcattttaaaaagtggccagcagaacgaaagaaagtgaagaagacacatatcactgtcatttttaaactttacattatttttggcacaaatttttcagcaccattcggcactgacaggacaccatcagaaaaatcctctgtgaaatatttagtgaaaaacatgttattataatgtttcaataaattctggtaaaatcataatctgaagagcaaacagtggtcttcgtgagtgtaacaagtcgtcggtatgggtgctaagaagaagggtggtaagaagggtgaggcaggggccccggcggcggacgcggggggcgccgcccccggcgggggtgctgacgagagcaaggccgcgaagcctgaggagagcaaggcagacgccggcaagagcgaagccgacgtcaaggatgggaagagcgaagctgacgtggcgaaatagactgacaaactccttgcaatagatgtttatgtgaactgagcaattttatattaaaacgagtttaaaaaaacaaaaaaaaaa

SEQ ID NO: 711 - DNA, 3082 bp, Plutella xylostella
gatatttttaaaattagaacgtgtcactctgacactaaatcagacaaataatgtcaagactcaaaattgcaaacgtttcttcaactccaaaataaaatcaatatttatcattataatcataaattgcacgtgaactttgaattggtgaaacctgtagagtataaattgcattaaaattactatggcagcggtgggcaaatgtcaaaaagataaaccaggtcggcccagtcccgtccccgcgccgcgccccacggccgcgtctgccgcgcgcgccgcccgcaacgccaccaaccggagcctggcacaagccaaggagagacccaagaattcgccctccaatgttggaaaggccaagacttctccacaagcacatacgaaagacaaatccgatcctgtgcaaataagccctgcaaaacaacctgatgaagtgattaataacacaatacctgaccagcatgcaaatgaagaaattgaaacatttgtggtagcacgagattacattattaatactatagacgagatctctgaaagccacaatactggaaacagtcatcaggaacttccagacattgaagctaacgaagcggaagtaaataatattagtcgaccaccaacaccaaaagttccagaagcaccaaagtgtcccagcagaccccgaacaccgaaagtgcccgaagcaccccagttacccagcaggccccaaacaccaaaacttcccgaggcaccaaaatgccccagcagaccccaaacaccagttcacccagggcagaactcgaatgtatccagccgacccaacaccccgctcagggcgagcagttggagcaagaatcattcctcagtgacgattccacggctcaactccgccaagtcagcgatcccagagccttgcaacaaggaaccagacttgaaagctgtttacgccgcacagcatcagcagtttaacactatgaagaaagaactggatacaagacaacaagcaatcctggaattatttgacaaccttcaaggtctccgcatgcgcatggaccacgagggcatcccggggtcgggggagggggtgcaggtcaacgacctggtgctgctgaatgtgacagactgggccagtgacgaggtggcccggctctaccgcgacgccctcgccgctcacagccccgacgatgctattgagcttgtcgctagtattctaccttatgatgaaaattcccttgcggaattagacgaaagactgaccaatttacctgttggctttgttgatctatgcttagaggcaatcactacacgtcaagaaataatagattgggtgaaagaagaccttattgaaatccacgatatcaaggacgaggatgtgatggaacgcatagccaccttcaacacgcaggggctggagttgtgcgaagctcttcgggggctgaaacatttctccgacaatatcgtgggcaccatgaaaaatctctcaaaccgtgtcttccaagaacgcagtgcattggtgtcggtgggtgaaacgttagttcgggagatcgagaggctgcggctggacatcagtaaccatgcagcggctttagcagaactgcaaaaaaatcagtcagtggacacacgccgtgagctggaagaagaacgggcggcgagacactcggccaacagcaagttgtccaacctggaaccccaactgcgacaagccaagctccggatcagcaagatggatcgacagctgaaggaggctgaggccagcatagccagcctcaccggcactgtcaagtctctggaggatcagagtcgacaaagagaaagtatattggagggaaaagctagaaaattacgggaatctttgagaaccacagaattggctaacaatcaaacattacagcaacggaacgctttgcaaaccgaggtgcaggagttgaaagaacaaatctccaaaatgactgagcaacacaaatccgttatcaaagaactgaacagtgaagtaaaggagttaaaaacgctacttgatgaacagaaagcacgctttgaagctgaggagcagagaaataaagaagcagatgaaaaaattgtagcaagccaagcttgtattgaggcactaaaagcaaaaattactgagatggaggagagcagaccaaatccggaattaccaactgaaagagaaatggatctatggtcagagctgcacgcgaccaaggagactctgcgggtggcagaggacgaggtgaccgcctgtaaacgagagaaaatacgcttcctggaaacactaacgaaaataacgaaaactgaggacaaagtggggatacagcaaaaattggctgcagaactggtgacgaaggaggaaataatagacaacatgcaaaggcagatccgagagctatcaaagaacgtgaaactaaacgaaaataaagtgatgcagtatgaacaatacgtgagagatttacaagcaaacaacaccaataaccaaggggactccaatgggtataatgtggcagaacttgaacaagagatattgcacttaaagatggcggtgctggatgccaaccatcagaacgacgcgctggcggagcaactgctacaaaaagagcagcaaatcgaccaacaagaaaaaacctcaaaagctcaggggagagtcatcaaaatccgcgaggagctgatcggtctactgaagggcaaggaggcggagcaggcgcggcggctggcggccctacaggcggacctcgaccagaggatgaagctcgtggacgaagtgaaccagcagatcgcgggcaaggcggacgagatccaggagttgttctcgactctggaaaccaagcagcagcagatccggcggctggagaagatcgtgctggcgctggaggagcagcagcggcgtgcgcaggcgcagcgcacccggcacgaggagaagatcgcggcgctggagcacgagctcgcggctggcggacgcagggagcgaaaattcctcttcttctaagtccgtgtcgcatttgtgcagcctgcgtgaagagggtgtggaagtgagcgtatacttagtgaaaatgtgatgtttttatagtttacaacgtcttgtgtatgttcagtttttttataaatctatacccaa

SEQ ID NO: 712 - DNA, 577 bp, Plutella xylostella
tgttgcttatgggatggagtcatatttctttgcaagccattgcgaagatggacttctgtacctggtactagttattattctgtggtataggtaagtatattatttttcgattttaaataaacactttttaaagtgttattttcgataaggaagaaggcggattcattgattaaaattgttggagtaattcgcctgaagtacaaataatgttcgggtgttggtatcaccggcgtcgacggttatacattatgcatgtagttttgaagaatgagctacatgaagaggcaccagtgctcttgttccgaggtgcgtaaggactataatcggcagaccatcgaggcgaggactgtaggcgaaggcgatacaatctgcgtcgcgcattgaggagcacaataagtatttgacttcctctcccacgaactgagcagcggatgtctcgacggccgacctccggcccccgaccaacatacattatgtcagctacgtaattatatcgacttattcttattttagcctcgtctcgggatggaccaaacaagaccaaggtttcctacctggcctacattatacagccaat

SEQ ID NO: 713 - DNA, 2505 bp, Plutella xylostella
ttctgataatctttggtagaaggaactcattgaggactgtgaggagcatgtgaggagagagcttctctaaaatccttgggagtgagagaaaaaagtttctatgccaaatctatttagccgtggttctactgtcaaattacatcagtcgagtatccgtctctctgacggaaacggaacaataaactcagacataaccttaatatttcggcaaaacattttaaattattgttttagctacgctatgtatctcaaccaaaaggcaattgttcatacttactaaaaaaaatcttagttactaaatgatggataaacattaaaaacactatggaagaacataagaaactgaaaacatcattagaaattgtatcaatatcagtgccaccacccttacaagtcgttgttagagtgctgaaatgtttgaaaactgtgattcactaatctagctgctaaagaaatgaggattcgaaaattaacaatcacttttagatgaaaactccaacgacttccttcataagtcaaacgagtcaaaagttccatttcaatgtgttggagttgacgattattatcgtggcatttcttgtgttcttcatagctgtacttatcatttacaaagtggtattcgtaccaccagcggtagttcgaccaaatgccacaaacgaataaatcaggggaccatgaagctttataggagcacaagatttttctgtgaagagacatttcagcagcgcctacacacaacaaccctgtgaatggaggacagaagtcaccgccgtgtgaacttgctcgcgcgacttgtgaaggagttcagggaccctacgaccctacaccgcgtcgcagtggctcgcacgtcgcccctgcccgtggcctcacactccggcgtggacccaccgggatggtctacattcagcaactttagtgaaagagataacgaaactccttatgctgtcccagtggttaataatatgcgcaacagactaaacaatttgtaccaaagatggagagatcgaacacggaatcttgtaatcgagtttatgaaaccaacagacagtgagttgagctatgcgcgccgagctgaagagagccaggggactcagtactcacatgatgcgcttctgcgtacctcagaaatacgacgacgcttcgaaaacggattcaacaaattatacaattgggttctaattttcggacaacgttgctatgattatgtggcaccaacaacatcatccgttaatgtgtctccgcccctggctatcacccaccagcccttgtgtcccaagccagaattggtaaagatagcaaagagaaaatcccacacacatttcactctagcgaaacctgaatccatttatgaagtccagaacatctgcaatgttacagagccaaaattttaccctaaaccatttatatcagaagagccaagtttatcaagtatgacatcaatgaatacggattttaacattttggtgccaacaactatactttccatactcctacttatttccattattcaactttacaaatgcttaaagcagtatttcaacagatctagatattagtagttacccacagaggtatcaataattccaagcataatggcttacccaactcagcctccatctacaacaccccctatggctcctatgtcagctcccgtcaccagatcctacgcatcgcccacccgatcccctccgcacgccggctcccgacgagctacttccatgttctacacttctcgccccaaccccaaaggagtagtgaaagtgtaccctaaaaagagcagactttcatcacagcctcaaagatctatgtcaggagtcacgccccagatgtcacagctcgttaatgaaaggcgcatgttcctgtcgccatctgtcaggcggaagccgtcagccttcgcgtccaagtctaccctgcaatccaccctcacgccgcggccacagcctcacatgttgcgcacctcgagatccccctatggatcacaaagctgcttgcctactccagggttcgatatccaagacacttcaccacaaatcttaccctcaccatcatctatttattatccttccccgttacttaaccaatcacactcgaagcgatctcccctccagacaaaaccaactcctagaatgacggtgcccgcacccattcccagcgtatctaccaactccgactattcctatcaacagttttacccagaaaggccttcgagttcaatgcgacggccactgtctgtatctgttgaatcctcgattgctgaatcttctttcgatactgatagttttagttcgaagcgttcatcttcgcttcggtctgcatcactggactcaccgccttatccatttgagcagctgatggcgataccggaggagtcggctggctcgtcggtgatgagtggggtgccggtgcggggctcgcgttccgaccccaccccgcttccccgcgcccggctgtcccccgcccccccgccgccgccgccgcccccccccccccccccctctacccact

SEQ ID NO: 714 - DNA, 1129 bp, Plutella xylostella
aactgctatggacttcttgtctgataataaataaataataataataataataataacttgaatagtggatatccgttgccttctggtatccaatatcgatatctggctacatccggcaaacctcgttccggaaaaatacattcctcctccactctctattctaccgaaaagtaattcaatcactcaagaaatacgttgtagctcacgagagatttgccaaactttgtcatcgggggacggaacttgtctcccgcgtggctctatattaggttttttgcgacgcaaaatggtgaaactagcgatattgctgaagtttttttcatagcgggttccggtaacatatttttgtgtagagatggagtaattttgtccggcgctccccccgcacgcacgcccctgtgacctacatcgctcacgtggcagcacctctatacaccgccataacatgctaacgtcaatcaacccttatgagcccgtttgaccacgacttctaatctcggcggctttaatatcgcctcattagaaccacgggggaaattctttgacggcgcggccgtgtgacctgattttcgcttcctgtttaccccttttaatagcgtgttttgaataaatatcaccttagctgctaccctcaaagagtagtagcttttataaaggcgttctcttcctaaacgagttcatttctattgcatttctctctcgagacgacttgctgactccccgttgggttttgtttgacgtcatcaatcaacgttcaatccgaagccacttacttggccacagttggcggtgttttcccactgcttgcccccgactcgcagacgacactgacagtgatgtattacacttttatccgcgtcgcttttcttgtaggtcaagaatcaagctgacgattccgactagaaatatagaaaatactattattgtactacttacatcgttcaatgtttaccaaacatttaatgtattaccgtaaaaaactttaaacgttatttaacaagtgtttaagacgaaatttgactgatttgttagtcttgtgacagccacattaaacatctgttaaatactgtctaactttttttgtaagagttccttacctttttagttaacctagctacacacacaacca

SEQ ID NO: 715 - DNA, 579 bp, Plutella xylostella
gctgattgttgggttcaacacgttcctgccgcccggatacaagattgaagtgcagagcaatggacaggtgagctgctttttcgtgttttttttactattatacagggtgttggaaaagtggtttgttaagccaaaaggggggagtctgggggtcatgctgaaagaccagagtcacctttccgcttactacaacttttttgtaacaccctgtatgttctaaagggggaagatttgtatgtgtgtttgaagccaataaactcaaaactataggaagattgttctaaatcatgcttcattttagtatgtggactactttaaatcccacgggaaactcatataaaaaaattaagtgaagcttgatggataaactgtcatcatcatccagtctctacgtttgctccgacgcagtctccactgttataggattttcaacaaatgtcatggctacgagcgtataaactaaaaaaaaagtaactttgccccatcccagatatggataaaaatatccattttcatcatggaaacaaatttgttatgtataaaataacttaaccaaactgaaaccttatgttttgggta

SEQ ID NO: 716 - DNA, 656 bp, Plutella xylostella
accgcgaacaattctaacattattgacaacacgatcattctgaaaaaagactacgaagactgccgagagcatattgtgtatttgaagaataatacgagggatattcagactcctatcaagtttaaagtaacgtacaagctagtccacgcggagccgcgctacagcaccgtggggtcgctgcccaacatcgacgagtacccggtgctgaacgccaccgccaccaccagcttcaccgccaacttcctcaacgactgcggcagcgacgccgtctgcgtcagcgacctcgtggtggaccctcagttgatgctgcctaagaccgaagatggtttagactatgctctaacactgggccaagaagaagaagtgaagctagcagtgaaggtggacaactacggagagtcagcatatgaaggacaactgattgtgatgcatcacgaaagcctgcattatattgcagctaacactagcgataaacacgtcatctgcacgagcttcaacaagacgatagtgacctgtatgctagagaacccgttcaagcgacaactggagggagatacgcccatcaccatgaggttcgacgcccgagcccttgacgacaatgaaccattcgtcgtcttcaccgtctgggctaactccacgtctaaggaactcacaaa

SEQ ID NO: 717 - DNA, 985 bp, Plutella xylostella
agtagcgcgattttcaaaaaaggttaactattattatatacctacctacatggtatgtacctatggcgaaactgctgtgatatttttgttttggttgtacgtttacgtcaataaaattacattgacgaggccaataagctattgaatcaacaactcattgagtcgttctttaaaatgctacttaatagaggaatatcaacttttaaattgctttcggtgattgtgagaagacctaatattttagcactatccactacttctacactgaagcaagctagccctagtactctagctaaatttaaaaaaaaacaatccgattttcaggtgtgtataaatactactgattgccgaattgcatttcatgttttaccttcctatttgtaaatatcattaccacactgaaggtcctgtgtgtttcctttgctcagccacacggttataagattatgaaaagtgtcatcgaccaagaattggccacacattaatcgtaaactaaagctcactttttaacggtgcggtgtggctaagacttctgcataatatactatatagaccacaaacttcagtttatgcccttgtaacttgtctggtacaatgtcttcgttttgaataaatactttgtaaactcattgactattaagttctttttcatattcttcaccatggtcgagcaaaggaaaggcatacaaatattttcatagccacatccacccattccatttttattaaaaacatattttaactcttaggctgaagatggaaagcctatattcttgaaaggcggattttgtgaccgaattttgtacagtttgacatggattttatgtcttgttggacttgtcaatgttgtgcttgtcatctatgatcactccaaaccaccctcatggaaatcagtttgttaaaatttgatgaaggcttttcacattacaaaacttgattgtgataatgataataaaaactatttgaaaccaaaaaaaaaaaaaaa

SEQ ID NO: 718 - DNA, 1357 bp, Plutella xylostella
tctttacgcagatcaaaaatgacaaatgtcactcgcaaaattttgatgaacttatttcctattgaatgttattgctataaaatttcctgagaaggtttatttgtattatactatttatctttgacacaatcatggaaggagctgaagaccttactgaagacctactctctgatgactcctggtgggaggaatggcgcgcgcacatcgaggagtatgggggggacaccgggaacgccatcgtcagtctattgctgccgatttatattcgattcacaatgtttaatgttgcaatgtttgtcgtaaaatacattcccaccaccatctacatgtaccgattcatgaaagacacatacaagaaaacacggagtagaatgctccagaaacaattggagctggaagagatcaaaattcagatcgaaataataaactccaagatgtgcgtgcacgccgcgcgccactcagaacggtcgtgcgagctgcggcgcgccatggagagactacgatccgtgcgggcccgggtccgacacgtgatggccacggaggaacacggacgcggggtggccgagtgggaggacacggccgccgccggcgagatgcccgacgcgaggagttatgaggaagaagagtttataaaatgcttgctaaaggactttcgatgcgaagacttgaacggaatatacgagcgggacggaagacctgatggcttcctggaccagtgtaatggtaaaaaggagaacagcgcaggagacccggagaccagcgtgtattctacgatcagtgatgaagatacttcgaagaaagactgccacgtgaagatcatcaaagtgaccaatgtgtacaaggtggcgtatctgaagaactacatcaaacagaagcggttgcggcgcgctaataaacacgcattgttggaaaaaaagatggagtccatcaaaaagctcctagaagactggcagacgacccttaacaacgttttaaacacgaagctgagaataaccctcgatccgagccagctcgaccatgtctctcaggaggccatgtgcatggaagccatgggggactattcaaagaccaactgctcagaaactgacagtgacattaaaatcaacgaggcatatgaagacccgaatttgaactgggaccaaccgcgttatccgtatccttatgaggatatgagggattgtgctcgcaatgagacggtatatgacacgagtatgtataactcgagtatagcagactgtctgaggtcccacgtgccggcgaatgtgctatttgtcttgccggaggagacaagtagtcaactagctattgaagaggtgaagagcgactgtggcgacgggtgaagaagtatgacggaaga

SEQ ID NO: 719 - DNA, 836 bp, Plutella xylostella
cggtgttctttttcaaaagggaatcaaattccttttcgttgtcctcccgctctgccatcagttggcttgagaggtaagctgtaagctaaaccctggattaacttaatatgagctacatgtccctaacccacaaactctttttcatccccgcccaccaccaattaacactcacccaacctaacctcgtcgccaacagttccgctggacgttcaacaacacggccaacagcaacgaggtctcagacgcgtatgtctcgcgcgcgggcacgagctccacggtcacgtacacgccacacacggagatggactacggcacgctgctgtgctgggcgcacaaccgcatcggccgccagcgcgtgccctgcgtctaccatattattgctgctggcaagccggatcaggtgcacaactgcagcgtggtcaacgcgtcgctcgcctcgttcggggtgcgctgcagcgagggcttcaacggaggcatgccgcagagcttcctgctcgaagtgcgagagattaacactcaggacatagtagcaaacgtatccagcgccgtgcctcggttcacagcggtggggttgtcccctggacgcacgtatgcggcggtagtgctcgcctacaacgccaagggacgaggcgagccgtacccactgagggccagcacgctacgcccgcctgagaaacatcatgtacatgataagagcttagacctgcctcgcaccgccttccagatgtcgggggcgatgtcggcggcggtgggcggcggcggcatcgtcatgatcctcgccatcctgttcatggtggcgctgaggcagcggtgcgccaagaggaaacccaggtccg

SEQ ID NO: 720 - DNA, 1137 bp, Plutella xylostella
aagcagtacctgagcatcgcggagcgggccgagttctcgtcctcgctggggctgtctgagactcaggtaaaaatctggttccaaaaccggcgagcgaaagcgaagcgcgtccaggaagccgagatagagaagctcaagatggcgcagttctcccgccacccccaccacctgtacccccatcccttgcagcagtacttccatccccaccccctgatgggggggaggcccatgccggggatggcgctgcacccgcagcacctgcaggcgatggtggcgcccccagtctcggctgggtcgccgtcaccgagcgccagcaacaaccagcagtgaagctggtggcggaaacaggaaacttgggtttaggagtttgaacctggctggtaaaggaaagtcgggtttacgagtttttcgatttcggtggaatgccagtagtagcgctggtgtactatcgtccgtttgttcgtgacccaaagtgtagagttctgatagttgtcaaattcatgtgattatgttactgtcactttgagatcgctataacatgtggtcggttgttgcgaaataaaataaaatctgaatttcaaattgctgattgtagatatatgtatacaaatgaattatgactcatgatttcacttgataacggtaaagttggtatacaagctatggttttaacccacgaaagtcataaatgctaaattattacttccatgtaggaccttgacttggaagaagaaaaaattgtttaatgttgtaataactgtataaattaattgtaaatagtacattacatactataattgctatgataagttaaattaatatttgtgcacgattgaatattgtattcgttattaattaaatgtaaacataattaaaactatgtaaacctatgattataaagattctgagcagttttagttcccagtacaaataatattatataaactcttcttaaaacataacaaaattaccgattataatgtatcaaaccaaattttaatgttaaaaaactatgtacataatatttaagtaataaagtaatgattatgcttaatattaatattaaaatagaatttaataaaatctgtacattgttatttctacttctgtagttgaaatatatttctttcacctgaa

SEQ ID NO: 721 - DNA, 1978 bp, Plutella xylostella
cgatatagtttattagttatcaaaatgctaacgaatttacaaaaagattgatatcttgataacatgcattatttcgtcttcagacctcgaactataacattagactcattgaccgcatcccagttcgaagacaccgcggaaagatgcaaacgacaattttcgctctaatattcgttatcattgagtcgatcaagtgttcgcctttcgacgatgggaaatacatccctaccaagtacaaacaacacgaggggatgtactctcggccgctcaccgaaggaaagtacataccgggggatgaagggaggtacacttacatataccggcaggggctctacccaagtgacaacggtgactaccgctacatacacatagtggggccgaacggtccgggagacgggccgggtgggcctgatgggccggacggtccggatgggccgagttggaacgactacatagggcatcggatatacgccgagaagtacccttacatccacgatgtgatcgaagcgctggtggacaagtttgtgtcgaagagttacgtgctatacggggatgagtcgggggtgagtgagagctactaccggccggtggaggcgcgcggcggcggcgctagtgcggtcaagtgcaagtatgtggagcagagagcgccgcacaacgaatcggagaaaagttccgagcgatacactgagtctcttcctgacctcacaccgcaagatggtgaagagattggagagtattacaactttaagggattgaaaagcttcatgaaggtttctaaagataaacgagtaaagaagatagttaaattgcagtacgatgtctcagtcagggtaattgatgagataatagaagtcgatcacgatgaagaagaagatcaagtacaaaaacgtaacgaaaaactatcacttaaaatggaaaatacgataaaacacgatgtagaaaatgaaattaaaaataaagtaacatatttaataaatgctcaggacaaagtgagaactttattattgaataaacaagaagaacaactagaaaaggaacttaaagacaaaatcgaaataaaaattaatgacacagtcaaaacagatgaaaaaaatcagatagaaaataatattaaagatcaaataaaggaagaaatgcaatatcaaattgaacaacaaaagaaagtacaaatggaaaaagatatgattgaaaaagaaatgaaattacaagaggaaaaacaaatgaaagaatccttagtaataaaagaaactatcgatcaatttgtagagtctcagacaaacgtagatctagaagtcgatgtaacgacaatggccacgacttcagaggaatagtaaagtgcctataattaatagtttaatacaaaccataggatgaaatgtacttacctaattatttataggaaaaccagtacactaaattctttaaggtttttttaaagaaaaaacgttaatttataactgctgtttaagtattataatgagcaagttgcaactaatgcaattaatctgtgtcataaagtcataatattaaatccagcacaatgggattaagagattctggttgctctttacagaatgttaagtatacatatttagaagtgcattgtgtaacgtgtataaagcattatagttagcagtaatatgtatgaaaggtgttttaacatcggttatactggtaatgttacctacgtattttaatacttacctcactgagtcattacttgttttattatgtttacagttcagtatttagataaaagtcatcaaataaattttctgtttattatttaaacgaagattacctacttatatcataatccaatttgaatataaaaagcttgtaatagaatagacaaaaactaaaatctatactaataggtagtggtatagttttgttaggactacccttaggtaattattgcaaggtagtgtatagatacaagttatcttcaatatagctcgtgcttatctgcgccaat

SEQ ID NO: 722 - DNA, 1479 bp, Plutella xylostella
gcacacgattaggtgcaacgtgcccgaatgcaacgacctccgccgcttcgtgtcccgcccgcccgcgtcgcccggccgccttcactgcaccatgttacggcacgacgacgaagaggccggagcctacacgctgtatctcgagcatctcggtggactggtgccgctgctgaagggaaggaggaccagcaagatccgacccgagttcgtgatctttgatccgcaggctgaaggagagaacctgaccaacagactgacagcgcgagagagcagcagcagcagcagcaccagcagcgcggggcgcgcctccccccgcgcgccgcgcaccccgcgccttcgccgccgcctgccagaccataccgattcttctgacactgagagagaagagggatgctcaggatcgccgaggctacagagaaggcggagagcgagagagcgacggaaaatgtgcagcgcagagagagacgagacgaacgaggagttggcgtacatcgactcactgccagaggatatccgtctagtagaagtaacgtccaacatttgggggacaaaattcaaaatgcacggattagccaagaatgtgcctgccaacttaggacaagtgacgtacaagacttcgttgctacacctgcagccgcgacaaatgactcttatgatcactgaactgagggacgattacccagtaggtccagaccccacctttaaccctaacatattttcggaagatgaagaagacgtcttccaatcgaatgataatgctaacaactcgccgtcccatactaataataacattagaaggaaactaacgctgaacgaaagggtcaataacaccaacaacataatccagaatgagactgccattaataataacgcgaacccttctttagctcgcgccgagtcgtatgacgagtttccttacattgataccaataatgagagtgtgagtaatgtcccggagactgtgtatagcgccccggtgcgccacacgcccgcggccactgagcgacgcgtgagtggaactaacagtgtgcccaacagacacgccatctcgccgctccggtgtgaaggatcagtaccgacattacagtcccctaaaaacgctgtagcacccaccgatatcatattcgagaggccctccccacaaacagtcacctgcgggggccgaggagacttctgtgggggcagaacagattacagcgtccgcggagacaacgtctcactaaagtccaatatcgatcagcaaccgtttagccttaatttaagcctagaaccgagtagacaagtaaccattaagaagtgtgacaaccacgtcaccgacaattgcctttcgaagcttcgaaagaacatctgcagccgtggagagtcggggtcttatgaaactaggatattgaagtctctgtgcaacaagaattacgagaacgaggtgcatccagatgcgatatcgcggcggggagatacgttaaagaaccttcagaagagcaa

SEQ ID NO: 723 - DNA, 1829 bp, Plutella xylostella
agtaggcatagactagaatattgaggtcaattgaggtaggtacctctgtcaaaaaaatatgattaaaaaacaagaagtcctaaaacatgtataaaaattattgttaactataactaaataaataactaacccatatcgcaatcaaggagatttcaaatacaattcagacccccagaccatacaatcaaaatgactacaatcatacaggtataaatcaaccataacatttacttctccattactactaaacatcacaagagaactctaacgtatattttttatcgttaattacaatgagtctatttgaagcaccgcaaaggcggggagttggttcttgtgcatgcagcagcaagcttggtggcggtggctgctgtggcaacaaaccttctagtccccaatctggtggcggctgctgcggcagcagaaacgccaaccctataccaccttcaccatacgaaagcaatgaagacaaaccccaaagaaaattcccccctagaccaccaacacccgcctctagcagacattctcgcaatctctcaatcttcatagacgatgactacgaacccacctctcaaccaaccgttgctaacgtagtcgtcactaacgaaccaaaaataaccatctcccgaacttcttatggaagtgattctgaagatgatttccttaccaaaaccccagtcaaatctaagatggaggaggtaaaatatcttatttacgataaattggaacctatcaaaaatcttgctgaagacatggttgtagtgaaagaccagctgaaagagttgcgggccgcggtggctacaatgaagaaaggtttgatggaatgtagcgacgaaacgagtttgctagagagccgactgcagagggtagataggacaaaagacgagctatactttatgaaattcactttggacaaattgcaggaagacgaccgggacgggtattcgccagcgaagatgatagaaataaaaggcgttccgtaccacgatgatgaggatttgtatgagatattgctgaagatctgcatgctggctgggtgtcacgtggagagagaccagctgactttcatatgccgagagtctaccaggtcgaagagaccccagaacattgtgatttgcttcaatgaacgcgcagtgaaggacgaattcgtccatgcagttcaggaactcaaagatttgaccaccaaagatctgggctactatgaacataacaaaatttatgttatttaattgttgctgctttttaataactttatggtaacttctcgggcgagccttgaaattgtaacatcgatacagattttctcagtaaattttgtgtaaaaataaatatatatattttttaaacctaaaaaaaaaaaaaaaaaaaaaacaagaagttctaaaacatgcataaaaattattgttaactataactaaataaataactaacccatatcgcaatcaaggagatttcaaatacaattcagacccccagaccatacaatcaaaatgactacaatcatacaggaagacgaccgggacgggtattcgccagcgaagatgatagaaataaaaggcgttccgtaccacgatgatgaggatttgtatgagatattgctgaagatctgcatgctggctgggtgtcacgtggagagagaccagctgactttcatatgccgagagtctaccaggtcgaagagaccccagaacattgtgatttgcttcaatgaacgcgcagtgaaggacgaattcgtccatgcagttcaggaactcaaagatttgaccaccaaagatctgggctactatgaacataacaaaatttatgttatttaattgttgctgcttttt

SEQ ID NO: 724 - DNA, 848 bp, Plutella xylostella
cacggcctcttcaccgaacatctcctgaagcatctccagcacgcactccttgaagtgcatccggtcgagcttgggcgcgagcggcaggtgcttgggcgcgggctgcagcgacgcggacaggatgcccgccacgagggcgtccgcgtacatgtccgtcacgggctgagccacccactcaagcgtaacaacactattctcgatggtacagtcgatgcacccgtagaggcgacacttggtctcactcgagaactccactcgagggcacagttgcagcaacacgtggcgtagaagcggcagagagccaccgtagtgcagcgactggcgctgcgtcacttctgtttgcgttagttctgtgtatttgttgagatcctcaggcgccagtatgtggtagttgaagttccgcttgacgaggatcccgtgcagctccgcgcccggctccggcgccgtcatggccagcgaacccattaccttggcagtcttgtctccgcggaagctgaggctgagcacctgcgtgttgcgcggcgtgtgtatcgcgagggctccgcggtgctcgcgctgtagggcagctttgagacgggacatctcgttctgctcgccgtggactagcaccacgtgcggcggcttcaatatattaataaactcggaggtctgctggtagtccgtgtgagccgagaacgatatgtagtctactgacatcttgagaggcagcttctgtcccgacatggaggtgatctcttcaggctccgacaggatcgtcttggcgagcgtgcctagatcggaagagcacacgtctgaactccagtcacagcgatagatctcgtatgccgtcttctgcttgaaaaaaaaag

SEQ ID NO: 725 - DNA, 1763 bp, Plutella xylostella
cgcccgcgttcaagaatgtagtgaagttctactcagacgttggcagcctcatctacacagtgcccgtgccctataatcaggcaaaagtctcagccctaacttggggccacgcggcgcggcgtctcttcgtggcttgcggcggcgcggtggccacagcacgcgtgtggcgcgtggtggctccactacagttactggccagggtgcgagccgcgcagtcgctggcggcgccgcaagccgccgcccaactgccgctgccgccgaggctgatgccgctggtggctagtctgtttgcgcacacgattaggtgcaacgtgcccgaatgcaacgacctccgccgcttcgtgtcccgcccgcccgcgtcgcccggccgcctgcactgcaccatgttacgtcacgacgatgaggaggccggtgcctacaccctgtacctcgagcatctgggcgggctggtgccgctgctgaagggaaggaggaccagcaagatccgacccgagttcgtgatctttgatccgcaggctgaaggagagaacctgaccaacagactgacagcgcgagagagcagcagcagcagcagcaccagcagcgcggggcgcgcctccccccgcgcgccgcgcaccccgcgccttcgccgccgcctgccagaccataccgattcttctgacactgagagagaagagggatgctcaggatcgccgaggctacagagaaggcggagagcgagagagcgacggaaaatgtgcagcgcagagagagacgagacgaacgaggagttggcgtacatcgactcactgccagaggatatccgtctagtagaagtaacgtccaacatttgggggacaaaattcaaaatgcacggattagccaagaatgtgcctgccaacttaggacaagtgacgtacaagacttcgttgctacacctgcagccgcgacaaatgactcttatgatcactgaactgagggacgattacccagtaggtccagaccccacctttaaccctaacatattttcggaagatgaagaagacgtcttccaatcgaatgataatgctaacaactcgccgtcccatactaataataacattagaaggaaactaacgctgaacgaaagggtcaataacaccaacaacataatccagaatgagactgccattaataataacgcgaacccttctttagctcgcgccgagtcgtatgacgagttcccttacattgatactaataatgagagtgtgagtaatgcgccggagaccgtgtacagcgcgccagtgcgtcacacccctgcggccactgagcgacgagtgagtggaactaacagtgtgcccaaccgacacgccatctcaccgctccggtgtgagggctcagtacctacattacagtcccctaaaaacgctgtagcaccaaccgacatcatattcgagaggccctccccgcaaacagtcacctgcggaggcagaggcgacttctgtgggggcagaacagattacagcgtccgcggagacaacgtctcactaaagtccaatatcgatcagcaaccgtttagccttaatttaagcctagaaccgagtagacaagtaaccattaagaagtgtgacaaccacgtcaccgacaattgcctttcgaagcttcgaaagaacatctgcagccgtggagagtcggggtcttatgaaactaggatattgaagtctctgtgcaacaagaattacgaaaacgaggtgcatccggatgcgatctcgcgtcggggagatacgttaaagaagagtact

SEQ ID NO: 726 - DNA, 2077 bp, Plutella xylostella
aaattcataggccaacacagtttcttttcatatttcaccgtcacagctagtgtgctttgtgtcaaaatgaattcgttattgatactcacgtccgtaataatagcaacaacatccggacattacacatactcggtgccgcaacacgcagtcgactacgccaagggagcagaaatctaccaatcaggactcgagctgcagcagcacaagggcttaggcgtccaagcgcaagcctacgctgcccaatcgcaccagacgcacggcttcggtggccaatcacagggattcggtggtgatgcacacaaattcataggccaacacagttttggcggcgatgcgaacaaaatcatagcacagtcgcacaatttcggtggtgactcaaaggagcagggtcacaagtttgccaatcaagttcacaaattcatcagccaagccccagcccattcttttgtcgtagaagctcataaactaccaacacacacttttgttgctgaaccgcacaaagctattcagtccagtgatttcggtgttcataagttcatcagtcagcctcacgggttcggtgaaggtcacaaattcacccaatcacagagcttcggcggtgacgcgcacaaattaatcggccaatcacacagttttggcggtgacgcacacaaattcggccaatcgcaaagtttcggaggtgacgctcacaaattcatcggtcagtcgcagggtttcggtggtgacgcgcataaattcattggccaatcgcaagggttcggtggggaatcgcacgggtttgccagccaatcgcacgaaagcagcgccgaggagcatgggtttgctggccaatcagtggggtacagtggagagcagcatgagattcacggaggaaattctgagggagagaagtcggccaagatcctgaaacaggactacgaaaaccacgggcacgcctatacctacagctatgctacagacaatggcatcaaagcccaagagaccggcaaagtagaaggaaagagtctctcagtcgaaggggaatactcctacacgggccacgacggccagacctacacggttcactacaccgctgatgaaaacggcttcagaccttcgggggctcatctccccacccctcccccggtgcctgaaggcatcctgaagagcctggagcagaacgctcatgaggaagctaacgggatctttgacgacggaagctacaaagaatcccactcatctgaggagcaactaccccaatacgagtcgagttacgagcactaccagccccagaccgccactgaagcccctcagggccaccaccagaccttccaaggtcaagttcaatccttccaaggtcaccaccagcaaccacaagcgttccacggcgaacaccaaagtttcggtggaggattcggccatggtgccacagtccacgtcactaactccaatggtgggggctaccattatggacactaaggagtaacgtttgaggatggtttttgtgtgctttgagttgtgctgtcaattgttttgtggagtcatttttttagagggattatgggaattagactgattttggtgcgactcaaaatgcgtaaaaatgttatatctagttatacgcgacagaaattgtttaggaaattctatttatacttaggatgaatgtagtactttgctgtccaattaatgcaagcatgtgaatttaagagcatgttttggatacgaagtaattttatttattctagatgataaattgtcaaaatttaaaatctcctgtagtagcattattagtagaaaatttgctttgtttcaatgtgagtaaattagtccttagataattaaattattcggttcaattttatcacaaaactacaggattgtggtgaggagtaaggaattagaaacttgtagttttgttagtaaaaaccaaaaagaaaataccaaaaaaatgctttacagcaatttgttattataaaatattgttgatgattgttaaaattgttatgttgttatttatataaaaaacaaatgttattgctttataaataaaatactttaaaatgttaaaaaaaaaaaaaaaaaaaaaacaaaaaaa

SEQ ID NO: 727 - DNA, 2013 bp, Plutella xylostella
ccccccccccccccccccaccacacttccccaccacgacgctcttccgatcttgttgaagaagaaaatgtaacttaagtactgttttatctttttgaatcctttgcaccctccaatccacctataccgccctgcgctcagtgctaggtacgcaggatctgatgtaagtatatgtattgtgccctgttgtctgtaatatgatgtagggatcctgatttaacatacttacccaatacttattaaaaacgtgcctggtaatggtaaataataaacttaaaacacagcctgcctgcttgtatattagtgcacgcgttaatcgaacattcaattatagtcatattagacatccagtacaccaagtaaatcaaaaactgtgacctaagacctatctgtaaaatattcacagattagactcagaccggcagatggtgctggcttcccgtcagcacgccgtcaagcacgagctgctgaaggatgaagagacggaggtccgcacggcgtacgagaccctgctcaagacacacctagctgatgagaagaaccagcggcaacgcaggttcaaagtggagacgcagctggtgtcgtggctgcagaagtacgacgcggagatgggcgacaagcaggccgagctggacgagttcacggacaagctggaggaggaggagaggaggtgccgggagctggaggagcagctagcagaacaagacaaggcctacctgccgctcatggaggagcgggaggcggagtacgagcaggagatgatgcagaagatgcacaagtttatgctggagcacgcggcccgcgtcgtgcagaccgcgtggagagaggtgctggctaatagggctgagaagaagaagcaaaaaggaaaagggaaaaagggtaaaaagaaaacataaataatagtttacacatcctactactcactcgtcttttaaatgttacagttgagaaagttacagaagaaaatagcagaaggggacacgaagaaaagcaagaagttgaaagagaagttaaaaaagaagtgagaacgcaactttttaatatatattttttattgtaactatcgtattgtttcaaagaacagaataaaatttaaaagtttaaaaaaatataacagcagtattggtcacgccacatcaatcgtatactcgtacttaagtacttacataaatttcaacgctatttaatttccattatctgcctccgtaacagtaggtaggtactaagtaagttttacaaaagcctataaaaggaatgccttctttttctctccatatactcaattaagtacctcgcatactttataagtcgttctccaacaattccaaatgtctgatggctctaacatcgatgagtgtgtcggaagagcttttcgtggtgggaacgaatgagaccgcgcgcctcgccctttcaccgttccgcagtgctggatgtaagtctcgtaagtggacctgcaggttctgcgcggtgtgctccgtgcgagatatcttctgttgtgccgctttcagttctgcatccagcttcttcttttcttcttctagctcttgcaatcttctttctgcctctctatattgtgcctctttctctgcctgtagcatttcaaactgttttcttttaagtctttcttcctctaacattctgttttgttcttcctgaaggcgttctagttcttcacgtttttcccattcttcagctaaaacctcgtaagtggacctgcaggttttgcgcagtgtgctccgtgcgagatatcttctgttgtgccgctttcagttctgcatccagcttcttcttttcttcttctagctcttgcaatcttctttctgcctctctatattgtgcctctttctctgcctgtagcatttcaaactgttttcttttaagtctttcttcctctaacattctgttttgttcttcctgaaggcgttctagttcttcacgtttttcccattcttcagctaaaacctcgtaagtggacctgcaggttttgcgcagtgtgctccgtgcgagatatctt

SEQ ID NO: 728 - DNA, 1897 bp, Plutella xylostella
gtccttacaatctaaaacatgttgaaaatatgataacctttatttattacaacttatcattatttgagtggagatcaatttacttaaactattacaagtttatatttacttaacaattacctgacttatttattaatttatatttatattacctgactcacggtattactttttcatcagctaaatctaagctattaatcaaactattttctttcgatgaaaccagatttctgttggtcatccgaactgtttctcctttttcctgtttcaacgatgttctgtgctgtatgaagaaccacataaatatccccatagcgggcacagacagtgccgtgctgatgtagtagaacgcgccggcgtcgtggctgagggtcatcatgtagaaccacgagtacaccgggcccgacaccatcgacgtcactatctccatcaggttgaatagggatatcattttacccaattcatcgcttgtgactaatttagatgagatcgatcgtaaagctgtaaaggaggacgcattgaatgtttctacggcaatagctaagtagaattcatatccgtttttggcaagggccgatagaatagcgccgacaaaatgactgcagttggatatcagaccaagaaccgagtcgtcccatttcaacatgcgactaaagaaacttattgatattaatgcacctgaaacacaaattaagtttaaaattacgtgactttgtagaggtaataattataaatatactgttgcagagtagtttactttctataaataatatgatttagcttaccaagtgcatgaacgcacacgtaaaatgtattgaagaagctatacttaacagcgtcccactgaaagcgatatcttgtgaacaaatatcgtactgtaaactctccataagacggcccataaataaaagcaatggccgtgaacactaggatggcttttgtgcgccggcgattgggtccctttttgaatgtcacttgaaaagtatcccttacatgttttacatcaaaaaatgtcttcagaaaattccacattccggttttttccacgtttttcttattgcccggtctttgaggatcctgtatatagaagtatccgtacactatactgaagaagtagagcaagccactgagtgtgaacacgccgtagtagcccaggtgtttgagcaacaccccgctgagggcggagccgatgggcgtgcccgcggtcaggcacaggttggcgatgcccacacggaacgtcctggactcctcgctggagacatcactgatgtagctgaaaacacccatatacgtggtgatccaaccgccagtcacggcggggaagaaagcttccataaacatcgtcacctgcaccggcatttcatagaagaaatacgtgttcaaaatgttgctcaaacacatgacgaaatctcctactaccggtataagaacgcacgctttcctctttcctgtcctgtcactccacgcgcctatgaataggatcaggaaactggggatcgccgtgaggagcacattcttccacacttccatcgatgctatcagcttctgcacttgtatctcttcctcgtgatacctgtctccctccttcgctatgagagcatcacacacttgatcaccataacccaggttcacgcggcatgccttgtccaggttaaggttttgcatcgcgagcctagctaggactccaggtactacgtaagaagctagaatcggttctaaagtcacattgtttttaatatttatgagcttttctttccatgttgtgtttggtttcgcttcatttgatttattctccggtttcaatggctgctcctcgggcaggtctgatttgtccatatttttaaaacaagcttgtccaatcgtttcccaattgcaactaacatagattgtaaatgta

SEQ ID NO: 729 - DNA, 922 bp, Plutella xylostella
gtccttacaatctaaaacatgttgaaaatatgataacctttatttattacaacttatcattatttgagtggagatcaatttacttaaactattacaagtttatatttacttaacaattacctgacttatttattaatttatatttatattacctgactcacggtattactttttcatcagctaaatctaagctattaatcaaactattttctttcgatgaaaccagatttctgtttgtcatccgaactgtttcccctttttcctgtttcaatgttgttctgtgctgtatgaagaaccacataaatatccccatagcgggcacagacagtgccgtgctgatgtagtagaacgcgccggcgtcgtggctgagggtcatcatgtagaaccacgagtacaccgggcccgacaccatcgacgtcactatctccatcaggttgaatagggatatcattttacccaattcatcgcttgtgactaatttagatgagatcgatcgtaaagctgtgaaggaggacgcattaaatgtttccacggcaacagctaagtagaattcatatccgtttttggccagggctgataaaatagcgcccacaaaatgactgcagttggatattagaccaagaaccgagtcgtcccatttcaacatgcgactaaagaaacttattgatattaatgcacccagtgcatgaacgcacacgtaaaaagtattgaagaagctatacttaacagcgtcccactgaaagcgatatcttgtaaacaaatatcgtactgtaaactcgccataagacggcccataaataaaggcaatggccgtgaacactaggatggcttttgtgcgccggcgattgagatcggaagagcacacgtctgaactccagtcacagcgatagatctcgtatgccgtcttctgcttgaaaaaaga

SEQ ID NO: 730 - DNA, 1702 bp, Plutella xylostella
attggctaacagcactcccgggcctggcttcactaccacaccattatgagtgaagtagacgtgagtgtgccacgggttggctcggacgcggcagtccaagtacacgtcggaaccctccaccaccttccccgcgtccaggttggcacccagctgtaggtggactattgggaaatgttgtatctccatcttccagccatcttcatgtgtagagtcctgcagcgcgggctgcacggcgcggcacgacagcacgcgacccgcatcctccactccaggggtgaaggagagcacgctgttggtcacgttgccgtccactgatgtcgtctccctcgcagtcttcagtctagttccccccttccaccacgagatggagggcttgggccgcgcgcccacggcctggcagaccagctcggtgctctgccccgccaccagggggcgcttgccgccctgcagacgcacccagaggggtcgcaaattgacatcaatggacagggtttctgacatcggagcgatggaggggtctgtcacagcctgacaagtcacatcagttccgaagtcagccctctgcaggcggaagctgacggtggctcgagcctcggagttggcgagcagctcgtgggccttccaccaggagacgcgagccgtgggacgccctccgacggcgacgcacgtcaagttgacgtcggtgccctcgtcgtagggtcccaacacccccccctgcacctcgttgccctcgtggttcagcactatcagacgctctggggggatcaaaacagtcaagttgagtctggtgttttttgtcggagacttaataaaatccactctgcaccggtactggccgctgtcttcagggcgcagcttggtcagtatcagcacggctggcttggtgtcgctccggaaggccgctcgtgagcccagcgtgcccgggtccgaccagtgcgacgtcaccccctcccgtgtgtccagcgtgtaaataggcgtagtatgcccctgcttgtaccagatgaccagccccatgcggtcgtcagcgagggtcggcgtgacgtcacacggcagctccacggagccaccgctgggtgcgtggtgggactccactgacgctgattcttcaataagtatctcctgttggctctcaacgcagtactgcagcagcaaactcaaaaaaacagtcgataaccacgacatgtttccggtcacgcctctatcgacagcagtttatcgatatcgacaccgcaatcgcggcgcatcactgtcacatcactacgcacttgacacttcactgcattttgtttttggaaattcgaattccgaatgcgaccgctcacgagcgctggctggttggatctgtttactccagagaagccaccgccaatcagcgatcccagaatccgaacacaaaccgatatctggttaatttgaaccaccacagcacaccataacgtaaatccacagacacacaagccgtcacaataaaaaacacaattgtaaacacacaataaaactcaaaaataaacacccgaaacacagatggttactctcactgtgttcttgattcccgaattcggaatacgtcgaatggattttacgatcgcgcgtgaatatcggcgcagagcgcgcgagtagacacgtccgctagatcggaagagcacacgtctgaactccagtcacagcgatagatctcgtatgccgtcttctgcttgaaaaa

SEQ ID NO: 731 - DNA, 1589 bp, Plutella xylostella
cccccccccccccccccccacttcccctacacgacgctcttccgatctgactttggcatttaaggttcaaaaattcaaaaatattgcaaaaataccacaaaattatcagttattactttacaaaaaatcccgtgatgaaaaacatcacattcatcgacaaaacttttgaaacaatgtaacagttaatacttaattaatcagaaatggatgacttcagtagttttgagaaagtaatcgttcgtgagctgtcgtgtcgcctgtgtttgtgtaatgaggtgtcgaagttgaagccgctcagtgctgagctgaaacggaagatcaaacgactgtttgatattactgtgcgggcagacgactatctacctaaagcgatatgtcatgactgtttgaaacaagtagtcactatgcacctgtactctatcaaagttaacaaaacccagaagtacttggacttccacaaacagagaagagacgacagagctcgaatctccgtcacagtaccaatattgaatgaaacaccacccaaagaagctcgattaaaaaaatcacccagagaaactaaaccgctaaacaatgaccaaggagacactaagtcagtaaagcctgtggtatccaagaaagttactccaaatgaaatgaaatttctggagtcactgacaatggaagagtttgcaaacactgagaaactcgaccaatgtattctatccagtcccggcagttccaacgaaggctcaccaaagaaaataactacaaataataataataataaaatagaaaaaaagagaagcaaaacaccatcgccggacgaaactacgaaaatagacgttttagatccaacagtccttataaacggtaggccagcgcgacatggggcggacttagacaaacagataacactcttctacaacatggaatgctgtatttgccacgaaagagccttccatttcaaatctctaatgaagcactacaaggagcgacacggcgtccccggctacctgacgtgctgcaacaagaagttccattacttctacccaaagaggataatagaacacatggctttccatctccaggccaatatcttcatgtgcagaagctgccaccacaacttccagtcgtcgtctgagctgcacgagcacgtgtccaacggcgggcggtcctcgggcaaggtgctgtgtccgcggtgcaccgaccgctaccccacttaccgcgagctgggcgcacatctcgtcactcaccggactgagaagatacagtgcgactactgcgctaaaattttaaagaaccaccatcgcaaaaaaactgttaacaaaatggaaaatttacgtttgtgtaatcattgcattcggacgttgaggacaatagaaaaacaggaaaaggatgctaaagagaagcttaaagtgaagaaaagtgaccctacacagaaccagacgcccaagttcaaaaaagcacttcagttcagtgacgaagaactatcaactgaagaaacagactaaatacgtatattattatgttttcaatacatctacgttctggctcctgaaaactatgtgtataaatagtaacaataaaccgtaaattttcgacaaaaa

SEQ ID NO: 732 - DNA, 980 bp, Plutella xylostella
ctcacgtggtgtagggttacaaaaccactcatagggctccgcacaccgcataacaatattggtatcggctgttgtaatttaaaacggacattataaatactagtggcgctggctggtgtagctgacttgtgtagtgagcgcgccggctgacagtgcaaagagcgggaaaagtttgacgtttcgagaaccgtttacgaagaaggcttgtgttcatcaatcaagatgattgtattaaagataacccttctcacggcgtgcttggcagcagcatcagctcagcagtacggacccaccactacccccgtgccaattctgaagcagatcaataaacaaaacgatgacggctcttacagcttcggatatgaagctgctgatgggtcgttcaagatcgagaccaagtaccccaatggcgatgtggccgggaagtacggatatgtggatgctgaagggaagacgagggaggtgtcgtatggagctggcagtaaacgagggttcgagccgcaaggaaccggcatcatggtgcctccgccgaccctgaatgaccctcccaccaacgcgctcaccgacggacaggaggacgacgggcagtaccgggaagaccccagcatttatgaggaccccaagtacaatagtcgcagccagaagtcacgaccgggccaggggttcaggtcgtaccagactgagccgcaataccagacgcaggtccagcaacctgcccagccgaggtatcaaccccaaccacaaccacaagcgcagcctaacttccaggattccttcttcagccagtctcctcagcagttcccgaggccccagtcgcagatctaccaccagcagccccagttctcgtaccaagcgtacacgccacagcagaactaccaaccccagcagagtttccaaccccagccgacgtaccaaccccagcaggcgtaccaaccccaacaggcgtatcaaccccagtatcagaactaccagaatcacaa

SEQ ID NO: 733 - DNA, 1477 bp, Plutella xylostella
aaattcataggccaacacagtttcttttcatatttcaccgtcacagctagtgtgctttgtgtcaaaatgaattcgttattgatactcacgtccgtaataatagcaacaacatccggacattacacatactcggtgccgcaacacgcagtcgactacgccaagggagcagaaatctaccaatcaggactcgagctgcagcagcacaagggcttaggcgtccaagcgcaagcctacgctgcccaatcgcaccagacgcacggcttcggtggccaatcacagggattcggtggtgatgcacacaaattcataggccaacacagttttggcggcgatgcgaacaaaatcatagcacagtcgcacaatttcggtggtgactcaaaggagcagggtcacaagtttgccaatcaagttcacaaattcatcagccaagccccagcccattcttttgtcgtagaagctcataaactaccaacacacacttttgtcgctgaaccgcacaaagctattggtcagtccagtgatttcggtgttcataagttcatcagccagcctcacgggttcggggaaggtcacaaattcacccaatcacagagcttcggcgttgacgcgcacaaattcggccaatcgcaaagtttcggtggtgacgcacacaaattcatcggccaatcacaagggttcggtggagaatctcacgggttcgccagccaatcgcacgagagcagcgccgaggagcatggatttgctggccaatcagtgggatacagtggggagcagcatgagatacacggaggaaattctgagggagagaagtcggccaagatcctgaaacaggactacgaaaaccacgggcacgcctatacctacagctatgctacagacaatggcatcaaagcccaagagaccggcaaagtagaaggaaagagtctctcagtcgaaggggaatactcctacacgggccacgacggccagacctacacggttcactacaccgctgatgaaaacggcttcagaccttcgggggctcatctccccacccctcccccggtgcctgaaggcatcctgaagagcctggagcagaacgctcatgaggaagctaacgggatctttgacgacggaagctacaaagaatcccactcgtctgaggagcagctcccgcaatacgagtcgagctacgagcactaccagccccaaactgccactgaagcccctcagatccaccaccagaccttccaaggtcaagttcaatccttccaaggtcaccaccagcaaccacaagcgttccacggcgaacaccaaagtttcggtggaggattcggccatggtgccacagtccacgtcactaactccaatggtgggggctaccattatggacactaaggagtaacgtttgaggatggtttttgtgtgctttgagttgtgctgtcaattgttttgtggagtcatttttttagagggattatgggaattagactgattt

SEQ ID NO: 734 - DNA, 1002 bp, Plutella xylostella
gagcaatatatcaaaaactgcaaattcggtttagtagccacctatagtttagaaagttagcagctcagtgcagttgacattcgaactatgaacacccgcatgtagttagttaggtactaaattaaggatttaaatacttgcatacttataaataaaataaaatagtttagtaggccgccagtgtaaaaagtaaaatgcgtgtgctattattgtttgctgggatcatcctcagttctgttaatgggcaagccagcgtcagcacccggctactcgggggggcgccgaccaccatagagcggtgtcccatagtggcgcagctgctgcgtgagcgcgtgcagtactgcgccgcggtcgtgctcaccgcgcgccacgtgctctccgccgcgcattgtatactcgctgacccgacttataacaacccgaaactgtggaaaattcgtgtggggtcttcataccgcactcggggaggggtcctgcacgatgtgaagaccatcattacgcacccaggtttcgacaaaagaatttacaacaatgatgtggctgtattagtagcatcaaagccgtttaccctgaacaagtacgtgagacaaggaactataccgaagccaggcaccgaaactaaggaaaactccaaagttacactgattgggtggggtgtcacgacgaatgatccaaacagcatgcaacccgatcagatgcgatacgcaacacttcgcacgatcgaccacgcgacttgccagaagcgatacagcaatctcagtgccacaataaccgaggcaatgatgtgcggtggcttattagatcaagggggagtcgacggatgctacggagattcaggaggacccctaatctataaaggagttgtggtcggcctaatgtcttttggctacagctgtggccatccttactacccgggcgtgtatacgaaacttgcttatttctctgattggatagtaaatacaatacgtgataataaatgaactgataataaaaaaaaaaaag

SEQ ID NO: 735 - DNA, 1751 bp, Plutella xylostella
cgctctttgaattctgacctgacagaagttattcgatcacatgccaacagtttcataaaattttagaaataatatttatctttggtgtatttaggaaatatgataattaatgttttagtgccagtttgttttgttttatatagctgtggatcaatatcaggtgagaggacacctgctgaaaatgaggtcaagaggggtcagtacccatacatggcattcctatactacccggacgacacgatcgtggacacggccgggaaccggttcatccaggacgccgtgctgctgaagcctgattggctggtgagcgcggccattgaccccatggaggccaacgacgtggctgtcggcttccccgccaagaccctgctggccagagctggagccgtcactattgatgccaatatcaccctcaatgaagatgaaaatgaacaggagcgggaggtgataaggatagtgcgtccagccaaccacgacatgtacaagtactggctgacggatgtgtctctgctgaagactctcgaagccttcaaggagacgcctgcggtcgcgcccgcggcgctcgctaccacctcgtacactgacaaagtttgcactatacttgtgttcacgaagcagtccaccaatacgagtgacaaggtgctgacccatctgtcagtggagatgctgtcgccgtcagcggctacctgcggtgcggagtacgcggagaagaccatgacctgcgcctctgacccggctgacacgagcgtgcccgctgactactgccatggaaatgaaggcggccctctcatctgcgacaacttggtagtaggcctacagacgtacctgaacaaccagtgcaagccgccgcacctgttccaactattgtctggttggagcagcttcacgacttgcgggactgaggagaagtgcagtgaggagtactgcagccagatctgccgagagaccctcaaggacgagcctagagtcaccagcccgcttggcgggagcacacggctttacaacgacttagatgccgaagttgactccaaagacaactcaacggcggcgaataccactgtagatgctcacgcgagctcgcacgacaacgaaactgagtcaactgacgccgacgctaccacaacagaaaacagcacggatgcagaagccacatcagaaggcggtagtacggtgcatcctgaccactttgagcactcgcctggtaatgagacgagcgacatcgaggtgagtaacagcacggaccccgcggagaccgagcgacgcgtgatgaacaagactgaagtagaacgaagcgtcagatactccccccacattcacaggcgacaaaccggtagcgcccccaaacagaaccctgtcgcgatttctgcagagctggtcatcgtaattgctaatctattacttgcagtttaatcatatcactgtttggtcaaagacagagagtttcattctcatgtagtcatgttagatagacgggaaagatatgtatttgtacattggtattttgttgctgtaatgttattgacttgaaatattgtttacgatagaataaattgatttgataagactttgttggtggtgttatttaaagatgtggggggaagtttcctgtaagtagagttagtaagcgcgcttcgcggtgttgctgctaatagcattaacaagtttccagactgttcgcgtataagctgttgtagtaactttggtaagaatctaggaattggaaataaaacaataaattaaaaagaaaaaat

SEQ ID NO: 736 - DNA, 1577 bp, Plutella xylostella
gtggcttcggtatgtgggtaggtgcggcggacggtttggtaacggctcgttacaaacttaaatagatagatttttgtttaaaatataaaattatccaaattacaaattcaatgcattgcacaatttcctatttaatcacttaaattcaaaatattctttggtactataaaaacattccatgactagccatttttttaacctatatttaaattgattaagcggtaaatctttaataatttctggaagcttattgtatatacggactgccattatataacaattattttgtgcttttgctgttttaaaacttggcagaactagttgccttgggtatctagtgtgaaaagttaataagtcacccttttttgtgaagagatcagtattttgtttcacaaaaatacaaatttcataaatatatatacaaggtaacgtcaaaagcgataattctctaaaatagttcctacatgataccatttggctgatgtcacacattgctctgatacattttttttgcataataaaaagatcattaatatttacacaatttccccataccacaattccataatgcaaagctgatgctacgtagccatgataagccattagtgctgtttgtttacctgagatttttgttagcctatacagtgcgtatgtaaatctattgattttaccaatgacatactcaatatgatgtttccatgataaattttgatctattgtaagtcctaaaaattttgttaccttcgaaggttttacagtttggttttcataatttatatttatttcctctgtgggacctttcctgttaaagaagtgcatatatgtggtcttatcaatatttacgcacagattattatttttaagccagtgaataacatttcctatagtaccgtttacctttcgttcaaagttatttttaccatcatcttgtatgacaatcgatatgtcatctgcgaacaatgtacatttataatccatatcgaacacgaacattagtaggcaacaacgtaacgtagcgcagcgtcgctcgcctgttaaatctgacgtaactttggatctgactgatgtttgacaggcgagcgacactgtttaatggataaatgtgtaggtggtggtacggtagctgaaaaagaaacattgagcaattcattcaaaagctaatagtcggaacaatcaaaggagcttctatgaatttgagagaactttgatcgcaatcacaaccgcaataaattggtgatgcttttatcgaagggtatgcatagtcgtttagaactgttttctcgtatcaggtgttgtccacctattcagcaattataatatcttctatataataacaaacactacctagttacttatttgctctacaaatagcttggttaccaaataaatagtacttattacacaataaatatcggtaaaactcacttcatggattgattttcatacacttgacaagatattaatgatataataagtaatatgatgaaagccataataaaacttaaataattattatgaaattatataagggatataaccaatataaccatgactcacattaacttaacttcgctttt

SEQ ID NO: 737 - DNA, 800 bp, Plutella xylostella
gaaatcttcatccataaatttgtctcaatgtgtcagaattctgacactttcaaacaaaattattaagtaaataaaaatgaaataaacaaaatgatctcacaaggatgaacaatagtgaaaccgaaacacctttccaactgaagctgttataatggaggacgaattcaacaaactgataccagtgggcagagataatgtggagagcatcattgattggctaaaagaagcaaaattcgtgaacgacaacacagaagaagcagctagaggctacctcggcggtgacggcaacgttgactttccgacctttaaagacgccctagcctccatagctatagataccaacagaaacgtcaatgagctattcatggcttttatgaagtggtgtcactgctactccacctgtataccaccgcctgaagagcctagtaccaccgttaagaagaggagaatgagaatgaaacctaagtctactaaagatgattgagttaaagattctgagtgggaagtgggaggttttagtcttgtatggcgtgggagagtcgccacctagtgataagtcggtgaactagctccgtgcagatctgagtcggttttcactgctcgatcggattagaaaaacctacactttgcgccccgtgagactgtggatacaattacagataaggttagataaaatagtctttaaaaacgtaaactttaatgctatagtaaattactgtcaaaaccttcacttatgtgtgtaaaaactttataacatatcaatattgggaatcacaataaaacaataaaagtataaaaaa

SEQ ID NO: 738 - DNA, 1633 bp, Plutella xylostella
ttttttttttttttttttttttattaactatttccgtttcaagatgcttgtttaaaaatatttttttattattttaggttttagattaagtatttttgttttttaatgtacagtccagtgttttatatattattataatcttttagtgttcatttacaaatcatgcctgagtgttgccagccatgtccagcgccgtccgcgggcaccggggggcaggggcggggcgcgggggggtgcccttgcaagagctgctgctgtggcaagccgcccgtgatcacgccttgctacaaacagccgaaggtcccggcgtcgtacgctccccgccgggtctacatgaagccgacggctcccgtggaaggctgcaccacatacaagctgtcgtacctacccgtcgagtgcaagaacctgcgcggggaggcaaggaagccgacggggaacatcatcctgagctgcgcgcccatggagggggaaactatacagaagctatcctacctgcccaacgaaatttgcgtgacaaacccgatccgtccgtgcaaccacgacatgtggggccagggccccatgcaaagcctcaccacgcagcgccatgactttgtgccgaagccatcttgcgtcagggagtctttcaagccagaccccaagtaccattgtgtggaggcgccttttgaaaaccgcacgattaaccgcatgtcgtacctggacccgggccgcctggcccgcagcaagtcctacgcacccaccaagtgctacgagagacccacagccccaatggagtgtgcgacgacacacaagatgtcgtacctgccgacctgtgtggccccgccgcaacgaccgccgtgggcctgtaagggacagtaccagaagccttgccagaggtttgacggtacgacggtgtaccaagggtctttcttgccgccaggaatggattgcagcgaggtgcaggacccttgttcctatggcgattgcaatccatgcccgtgcaagtgtcctgcggaatgtataagtaaagacccgtgcgcgtgtgacttccccaaggcagcctgttgctagcggccgccatattgaatgtcgttctaaatttgaatgtgtaagatagcgctttccgttgaaggcattttttttattaaccgtaaggcaccaaatattaaatggttacttgaattagttcaaatattaaattaaattgtctacttgaattagtacaaatattaaattgtctaatattactaaatagtagtttaatgtctgcgagtggcactaagcatgacgcaataactaaatagaaccgttttccccccgtggggcagaaaacagacatttaggtgttcgtgccttcgcttgaaccaccatgagataacgcgttataattcagccatagtaaagtgctagattgactgcttcactagcgccacctagcgtcagacgcaacaatgtgtatgacgatattcatttataaacataattatttgaaattattactacgataatattgtgataattaatttaatcttaattcttatgacctgtaatgcatatttatcaataacttaatatgaatatatatgggcgtttaagcatgaagcatttaatgtaacagtgcttttattcttatgttatatacgaatacataacg

SEQ ID NO: 739 - DNA, 1902 bp, Plutella xylostella
gacacatttgattcatagattgttttgaagttagattgtttcttgggatttgttttgctttgggtttgtgcctgctcgtgagtaaagctttcactacgtaagtagttatacatattatggatactcccataaacttcacagatgctactcagttcacgagtcacccgcttttcactgtgcattttgcacctacgtgataagtcgcgaaccgttcgtcgttttggaatgaacacaatacactatagaaatgtagatgtgcgggtttcctcacgattttttccttcaccgtaaaaacacgtggtataattatacttttaggtatcccttatttcttcagaattcattggtacttggccgaattcgaactgaagacagtatccgttacaccgccatggctcaaattattactctgagcttttgtatttgcattttagcatttttcagcgccgaaagattttacctttggccacagagtacctacctagttaagacaaacttaagacctactttgacataccaagtgttcttttctctatggacataactattttgacattttatacgtctttttgtgaatagccaaagccggagtagcgttaaaattttctacttattaaatgtgtagtttgaactaagttacctacaatggcacggaggagaaaaattaaatccatcaattattcaaggccaatgttattatttatactatgttctttacaaatatacattatcattgtattgtatctaatattttcccatagtatccctctgaccactattttctctgatatacaatccgatgtgaatatcaagcaaatgaagacaattctgctatgggtaaacccctattttcaacttaatttaaacctttttagtggtggaactgatatgtttaaagcgagtaactgctcgtatcaaaactgctacgttgtgaaaaacgcaacggaatttcccgaaatgtcccatgaggagtatgatgctataatattcaacggctgcccgcgacagaacctgcccactgacgcgatggcgacgcctcttattcgaaggccaagtcaaagatatatcttcttccagttagaaccaccaaccaaagttccagtatgtgatattttatacgaaaacttttttaactggactgtaagttatcgctttgattctacaatattttggccgtttttcttagtgaaagatgtcaataatcggactattggacctgggttgaatatgaactggattaatcctgaagaaatgctgtcgattgatgaggatctggcagcgaaattgagaaagaaaaaaaaattagcagcttggctagtcagtaattgctggaatgttgagaacgatagagtagaatatgttcattacttacagcaggcgctcaaaagatacaacgaagtcgtggacataataggcttctgcggtaactacaaatgtcccatgacccacatgaaacagtgcgaagaaatcttagagaacgactacgcattttatttagccttcgagaattcgttctctcaaaattacgtaacggagaaggtcctacgtgggttgcagcattacatgataccgatcgtgtacgggggggttaactacagtaggttcttacctcctggatcatacatagacgctttacaactagggccggaaaaactggctgccctgatgcataaagtaggacatgatgagaatgaatacttccgatacttcaagtggagaaaccactattcattcgtggacaacgtgaataaaaccaccgctgtttgtgaactgtgctctaagctgaacgaagatactgagacgtcggtgtatacggaattcaggaaatggtggaaccacccgagtatgaattgcagtgagataaatggttcaaatgattattgaaaattcagaacagtactt

SEQ ID NO: 740 - DNA, 2865 bp, Plutella xylostella
ctttgtttctcaagttcggttctcggcaatgtaaatgagcttgttgtaaatgtagtgtggggaatctatgattctcagtcatcatcgttatcatcattagcaaaaaatttggtgtacaattatattattaagagcttcctcgagtgatgtatccagtataaactgccattgatgccatatttgccactgaactgaagtattcgtatcatcgattatctttcaccttgatcaatctacactggggtgcattcgactactatggtagactgtacaataaatcgaaaacatccttgcagacacccactccttcgcaatccaacgttgcaacagcgttctgaaacggctcgcgatcgatacgcctggcagtcggcgcccgcgaccaaagagtatcgttacctcgaaaaaagttaaacatactcgcgcgagttataccgcgaaaaaagtataacaatcaaatagtttggccgcgcgaaaagtttgacaaactttttgtgctcggttcttttttcaaaaatgcggttttgtttgcgttccgcttttgttctgttttgtgtttcagtgtgttgtgtttacggacaggatcaaaatgtgacagttaaagatgagttcccagccgagctggactactactccatgccggctctgtcggagctggatgacttcgacctctgcatgaggaagcctggagcggtctactgcatcgtggacatggaactgctggaggatgatactccgctgtaccagttcattaagaacttctcatctctaacctacaagaactaccgtcacagtaagctccaccgcggtgtctgcggcagccagcactgcggcctgaacaccagtcatgctgacgtgaaccctcaaactgtcagtgttctgagggactgcttcaaccagagcattcatcgagggtacggcttgcaggtagactcccttgaagtccggtactgcaagactcccgaacaaggcaactgggtgtctcccatcgacgcgacggacatcagcatcgggattgttctactcgtgctgtttctgatcaacctggcgtgttcagcctggtacttcttgtggccgccggagaaaggagaaggtaacggattcgtgttggcgttctgtgtacagaagaactggaaggctttgaaatacggcgggaaagctgatggaggcctcttcaagtgcttccaggctttgagattctacactatggtgatgatcctggggcttcactcgatgatcttcatagggtacggctacaccgccaaccccgagtttatcgaacattcctacgacgacttcttcaaagcgctcctgttcaacgctcgcgtcatcgtgcaaatcttcttcgtgatgggaggcttcctgatggcctacaagatgttccagtacgcggagacgcatcggttcacgctcaagatggtgcctatggcgctggtcaaccggtggatcagactgatgcccgcagtgctagtagtagctggtctcgccatgacgtgggtgccccacatgggctcagggccaatgtgggacgccgttgtggggcgagaacgcgagatgtgccgcaaaaactggtggcaactggccatattgagccccaatctgttcccgtttgagtacttgtgcttgccgcaggcttggtacctcggaaccgatactcagctgttcctcataactctggtgatcatgcatatcatatggcgctggccccgcaccgccgtcccgctgctctccagcgtcatggtcgtcagcctcgtcatcccgttcctgcagagctacttcatggacctcctgccaatcagagtcagcttgttcccggaatccatccgagacatattcggcttcaacgacacattctaccacgcgtacgtgtcggcgcagggcaactgggccggctaccacctgggcgtgatcaccgcctacttctaccacaaggcgcagactgagaagtggaacctgcacgagtctattttcatgaagctgctcttcctagcttccatcccgatcgcgtgtatcacggtcctgattggctgggacctccatcacagggaggcgagtgcttttgaggctgctacgtttaacgccttcaaccagaacttgttcgctctggccatctgtgtcttcatcatcggatgcttctatagagcaaacaaaatctacgtcggagccgtagagtggggccccctgcagccgctcgggcgcctctcctactgcgccatgctgctgcacgccaccgtgttgaggacctacggggggcagatgaggcgctctttctatgccacggattatactgctatcatgctgttcggaggaatagtgacagtcacatacctgttctcccttcctctccatctcttcgtagaagctccggcgtgcgcgcttcagaaactccttctgacgccaaagagaagaccaaagaacgagcaagaagatgacaacgggaaccaagtgaagcccggcatctccactgtttccgtgtccactgtgtccactcatatttaaacagtattattgaggagaaagtatagatgggcttgtttctgaaaaggtattcaaagttctgttgatctacggtaaaaaatatacaatagctgatggtaaggaacatcaaaaatttacagctatcaaaatatatattttttgcatggtttttagatttcatagcttgaaatttcgaaacggctatgtatattatataataaagtgaatgcatattcgtgataattatggaactagagacattttattagaaattactttgtttttgtatttgttaatctaagatgacttcgtagaagctctcctttgaatagcgttttagagagggttggtagtacctgataagtaggtttcacatatttcagacagcaa

SEQ ID NO: 741 - DNA, 1129 bp, Plutella xylostella
taatgatacggcgaccaccgagatctacacatagaggcacactctttccctacacgacgctcttccgatcctcattggtcagattcgcgagcagtaagccggtgcccatgtcgaagacctgtaataagaaagtctgtctgatgccgccgtcatggcctggagtgcagttcagcgtcagagagtcgtaagtgacatttgtgatctcgcacgctttcggggaagacggcttgtcagcaggtagtatgtgaaacagacaaggcttggtctgccggcccaccgcgttggtcccggagcattggacccacccgtagtcagccgatgtgttcaccatgtatagaaatgtaccgggtaaattctgtgcattgttgatggaactcgtgatcaactcgtgtttagtgtgtgtcgaactgttgaaccaccactggtaggacattggctccttaggattagcatccaagtcgcagtcaatttctaggatctccccgcgagccgctcgcatcacgccgggttgttgagacttgcacgtcgggatgtatttaacatccaacacaagttgctcactagacccctctcccaggctgttcctggcagaacacacgtatgccccggcagccttcctcgacaccttctgaagaaccaggctctgattggctaacagcactcccgggcctggcttcactaccacaccattatgagtgaagtagacgtgagtgtgccacgggttggctcggacgcggcagtccaagtacacgtcggaaccctccaccaccttccccgcgtccaggttggcacccagctgtaggtggactattgggaaatgttgtatctccatcttccagccatcttcatgtgtagagtcctgcagcgcgggctgcacggcgcggcacgacagcacgcgacccgcatcctccactccaggggtgaaggagagcacgctgttggtcacgttgccgtccactgatgtctggtgggggagagagatgaatgagtaacgaaggaaagcagtgatggaagctgtaaggttgatggaaggagatagagtcgtagttagagctgcagcgcttcgtagctgggtttatagtaagtatagatagattgaaaaatgctgggccagaagaattgacaagag

SEQ ID NO: 742 - DNA, 874 bp, Plutella xylostella
acctaatcttatcacagctcgcatcgctcgcgcggctgatctcttaatacatgcctatatgggtacacaattagctattaggtaagtacgaagctagtataagtagtagtaggtacctgcgaacatttagaatacatagagagtacaaaaaccacaactctattatgtgtctcgttatgtagagacgataactttttgtttccgtcctcgatacgacttaactttttaattaatcggtaatttttataggcaatagttattggtggtatagcaagacaagcagaacttataaagctgcatagtgctgcttagtttacctgcagacttaaataacttacgactggtttatccttgtatagacgcacacacacacgtgaaaaatcttgagaaaagttaaattaccagtctttgagctgtgagtgacacatagctacaggcgaaaacaaacaacataccttcatgtattggcgtctgtgtacacagcacctaattatcttgatacggccgtgatacgccagtccggatccttcgtttgttgactgactctagtgagccgatcggcgccaactacagacgtgttattcagctgtttcacagcaacgtaacgcctgaaaaacccgaataaataccaatgcatgaaaataaaattcatgatagtgaataatattactgtggggaattttgttactgtatctaatatcatagtgctgttacatacatattagtgccactgcgagtgtagttttttttgtccggactgaaacctgaataattataagagttcgtctcgccatgacgtggctatgtgggggggcggtggtgctgctggccgtggcggcgctggccgcggccggcaccgccgcgccggagctgt

SEQ ID NO: 743 - DNA, 2157 bp, Plutella xylostella
ggccgctctgggtcatggcgccatagagaaatggccattctcctttagaaaatgctgaactaaaattgactataacaaacatatcaaaagacaatgaaatgctaaaaaaagctacagatagtttgaaaaatgtacaaattaccccaagaaaattaaaagggaataaagaaaaagggacaccacaaaagggaaaattaaaacaagatgcaatcaaagtagacaagcaaacacaaaaaaatgaagttaaaaagaataaaaaagtggacaaacaaactcaaacggatgcagaaaagaataatcaaactaaatcaaagctacctaaaaaacatggtaaacgaccagtaattaaatcaagccaagaaaaaaagaagaataaacttttgctcattagcaccacaaaaaatcaaagcatactagagacagcgaaagtgatttggggagaggaatacgagttctgtcattgtgtctatcctaacacagggattaaggtaattttcagtgatctgcaaatgaaattaaaaaatcttacgaaaaatgacatgtgtattatgatgattggagaagaagatttcaaacatacaaataattattttgagctggttctgcacataagacaagcaacggagagtattgttcatacgaatattttggtttgcatgcctacttataaatattcagagaacacaaatgtatttaattggagagtagaatcatttaataacctactctatctggatgttctctcaaatgagcatgtttatttgatggatccaaatgtaaatctatcctatgaccatacaatgtttcttagatatggacaactaaatgctgtaggaatcaatgtaatactaaatgacatagctctgaacattcgtaaaatcaatgaattgaataaatctgacattaataataatattgacttgacagagccagataacaatctttttcttgcacaataaattgactgtacttcaccaaaacataaatggactcattaacaaatctgacgaattattgctcaatttagaccaactaaaaactggaactcaaggtagccccattgatgttttatgcatcactgagcataacatgatagcggatgattctgatttgctacacatacaaaattatacactagcttcaagctattataggaaaaatagacatggtggttcatgtattctgattcacaataatcataaatttaaagttttaaaacatgtcgagaacttaagtactgctaatgtactggaatgcagttgtatagagttaacgcagcacaacataataatactatgcgtgtatagggtccctaaatacacaaataatgcgtacgattccttttttagtgctttagataaaatattacacacaatctgttgtaatagtaaaaagaaggtaataatctgtggagactttaacattgatatgttaataaaaaacaaaaattcaaatggcttcttaaatatattacacagctataatatgaaagtggaaataaatcaaccaacaagactggctagtggcacatgccttgataacatattccataatatcacaggaagctacagtaaagttattgattttgcactctccgatcactctgcgcaactgatgaatttcccagtaaaatctttctgcacattaaattattggtataagttccaaagagattatagtgatgaaaatataaataaatttagagagtgtctaggtgcgatctcgtttaatgagatctggaatcaaagtgatattgatgcccacacagcattcgagaaatttcatgaaatttttgaattattttataacctctgttttccttacgtcaaaataaaaatgtcatgtgatcgaaaacctaaatggatttcgaagggtataaaactctgtagtaaaaataaacgtaaccttttatggaaatatagagtatcacgatcatcactggataaacacaaatataatgaatattcaaagcgattaaaactaataattaaacaaacacagaaatctcaaaataactaccttattaaaacagcggacaataaatgtaaaatgacttggaaaataataaaccaatttaaatctaataacctaaaagaatatatttacaaattaactgtcaatggtaaaactgtagacgattctttaaacattgcagag

SEQ ID NO: 744 - DNA, 813 bp, Plutella xylostella
agctgcatgtgagccagcttgtccaagttagcagaaatcttatgcaacttctccggcgtgagaccgtgctgctgcacactagggattttcgggacagacgacttcttagaagacgcatagtcgaaagactggtgctggtttctgggatcgtagtcggtgaagctatcgaccgtggccggctccccgtaggagttgacggcgccccaggtcatggggcggaatgggggtgcgggctgaggtggagggggctgctcgtggagctcagcgggggggtaggagggggcggcggaggagaagacgttcttgatggcgctgaaggccgagtggaggagggaggaaggtggttccagaggggtgtggtgcgcggtggccgccacgtgctgcacctcgttggtctccgccagcggcgtcagtatcaccagccccgcgtgcactccgttcagtttgcttcgcccgtcaaggggtgcagggtacttgtgggccgcatacccggtgggggctgagggtgctatgtgcgagtagtgagcaggtgccgtgggggccccgtagccgctcggagcgtactctatgtgggctggaggcggtggcccgtacacggctgtggaatggggtttatggctcaaggcggctgagctgacgatcttcttgcccagattgctgacggcatctcccttcactgagatgaccttgccaagagtggaagccagcgcgccgccgcccttgatcagctgtcccttgaggatggtgactcctccggtgatggccttcacggcttggaagagcgtgtagaggatcgacttctttaagccccag

SEQ ID NO: 745 - DNA, 1845 bp, Plutella xylostella
gtgagcgcggtactctgtggcagtccgcagtgcatcggaggccggcgcgcgcgacgcacgacgctcgtaccccctcgtctgtctcgctacgggcgtgaaagaaaagttcgccgcgcgggaaaacaagtgaacgttttgcatctcggttattggacttttcagtgatttgtatggagagttggattttatgttgaatggtcaatgaacggtattcctgttgccgcgaatatttagatcaagtggtcggattgtgcaatacgtgacagtgtcggatcgcgtaaagagatcgagtgaaagttgatcagtgtcgcggcgcgtccagcggagccctaacaatggagcacctgttccggcagcggcggctctccgtacccaagaggacgagcgagctggtggccctgctggcggtgtcctgtaccctgttcctgttcctccacacgcgagacctcagcaccaagctgcgccgcatggagggcaagctcaacgatgacgtcaccgccttcaaccacctcactgaccgcgcacagacggaccgcacggagcacggatatgcgtctgcgcaggagtacaagcaggtgctggaggccatacgcagggagaccaacgcggggggagagcgcgccaagccacagcgcacactcgaggccgaatctgaagagaacgagctggacgccaccctggctgagccaccggagtccccggagcttgtcccctcggcgtggcagctcaacaacacggcgcgggccggcatggagctgctgttcttcaatagggtgcccaaggttggcagccagaccttcatggagctgcttaggagactcgcgctgaggaataagtttgggttccaccgcgacacggtgcagcgcgtggagacgatccgcctggcgccggcggaccagcaggcgctggcgggccacgtcgcggcgcacgacccgccagactcgtacatcaagcacgtctgctatactaactttaccaggtacgggtacccggctcccatctacgtgaacgtggtgcgagacccggtggagagagtcatctcgtggtactactacgtgcgagcaccctggtactacgtggagaggaagcgcgccttccccgacctgccgctgcctgaccccgcctggctgaagaaggacttcgagacatgcgtgctgagcggcgaccgcgagtgccggtacgtgcagggcgagactcacgagggcatcggcgaccaccgccggcagacgctgttcttctgcggacacgagcccgagtgcactccgttcaacagtgcggaagcgctgcagcgcgccaagcgcgtggttgaacaggagtacgcggtggtgggcgtgctggaggacatgaactccacgctcacggcgctcgagcgctacatcccgcgcttcttcacgggcgccgccaagctgtactgggaacaactgaacacattcaaccgcatcaaccgcaacgcgttcaagccgccggtctcggaggcggtcaaggacatcgtgcgcgccaacttcaccagggaaattgagttctacgagttctgcaagcagaggctgcacctgcagctgaaggctctcaaggaccccaccatcaccctccccggcacacgcctccccacaacctccggcagaagccttagaaagaggagggcgcagagaagacgcggcgtttaaagtaacaaatgagcattatttgtgaactcatgtcgtcggaaaagacttttctccaccgttttgtgagtgttttgttttatagtgaggtcttcagtgtgcgaaagtgacgccctctgtgttaaaagtgatgaagctaaatgtcgagtgaggttcccgttttcaccgcaagatggcgggacta

SEQ ID NO: 746 - DNA, 2914 bp, Plutella xylostella
tgaaggttctttacgaccatggacagtttttaagaagaaagtgccaaaataaagaataaatatgaataaaatgtctgactattgacagataaataatccaaaacaggaaatttttcggtctcaatattttaaattattttttagtgccttttaattttaattttggcatacggtaaaacatttaaatctacttaaatggtgacataaacttgagaaccaatgttacctcagaccgggctgggtcggccatgtttggacgtcttctgtcagcgccgagggtcactctaccatgatgagctggtctccaaggctcaggcgaaggtggaaggaccctccctgggcaccaccaccctatccattgccatgctaacactgctgagtgtagtatgctgcagtgaaacttgtcagctcttagacggtatattcacaaactgtctcgctacaagtgttattaacgtcgccatttacttccttgtaacggcagcgttctgtttactcttcgttgtgaatgatggttcattggaatattttgaaaaggaaaaagaacgtctaagaccctattggagttctgtaacctcgttggcggagttttcagagacattacacctgaatgatgtgctgaaaacgagagtattgccttgcgaattcaaaacattagatggagacccaaaagtaccagatattgtttctacatttaaaatattgatcaaggaaaagctacatgaactcaagcttttgagtgaacttggtggatttcaatatcaaccaaatggcgggacaactgatcagcatggaaacaatccaaaaagtaattcacaaaagtatttccacaatacttcggaataccgagtacgggaaacgcttacttattttcggtcaaaaaagctatcgaaagagctttttaggcgaaaatgtaggaaaaaatcagtacgggtaccgatataccatgtaacccgtatgaggtcaaagattgacattcagaatgtggatgtgagtgtcaagcagtgtcccgcccccgctgccggcgctgctccagcaccgggagccccagtgccgggggccccggcgccagccacacccggcgctcccagtgctaaaggaaagtcaaaggttaagtccaaaaccaaatccaggacaaaatctagacagaagtccagacagaaatccaggcagaagtccaggatgaaatcaaaggttaagtctaaacaaaagtctcgagcaaaatcgaaaatgaaatcaaaaatcgggggaaaaaagaaaaagtctcccggtggtctggtgacggcgccgccggccgacgacacggggcgcgggttcgacgacgggttcgggcccatgttcaaccgcgcgcgccgcgccaacgacgagatggagtggatcaaccgacactacgagaagatcgtgggagtcagcaccacgcaggcacggaacacggcgctcgtcaaactcgagaggcagatacggaaaggagctaaagcatcgaagggataccaagggccaatggcggggatctcgcccctgtcggaggcggtggagctgtcgtggagcagggtgccggcgggcaagacctgcgcctgcccctacgactactgcatgtgcatgggcaacaagctgatggacacgcacaccatcccctacaacagctgtgcgaagtgcgacgtgtgggcctctctgacgaagtgcttcaactggctgggctgcgccggctggcacgtacgcatccaccagcccgccaacacgctgccgctgcgggtgctggagacactgcggcgcgagcgcatgatcgaggggcagttcattgcaggcaaatgggttcctcctgaatactgtttgtcaggctgccatccattctacaagaaggctcttaaacagaaagatgaagacgctatcaaagacgctatcgtgaacgtgaaaatcaaaagccctaaggagttagcaaaagaaaaagaggaacgagaaaatgccgaaatagaaaggatagtgaatgcagcggtcgctaaagaaatgaaagaacttatggatcaagtagacgttgaacctgatgaaagctcattcacatctgacgccgaacgagaagcatggaacatgaagaaaaaagctgaagctgatttagccaaagttaaagatagagctgcaaagaggaaagaagaagctatggaaaccaagaaaagtaatgccaaggatgtgactgagagagaaaaagaaagggaaaaggagaggaaagctaagaaagaaggcgaaaaagaagatgaaaagaaagaagagaaaaaggaggaaaagaaagaagagaagccgaaggaaaagaagaaggaaaccaaggacgagaagtcggagaaggcaaagtatgaggagcagaggaggaacaaggagaaggccaagaaggaggaaccggaagtgaggccccgccgcccccctggagctcctccaccaccagcagttccaggagccccgcccccgcctggagctcccggcgccccgctgcccccgggagctcccgcaccgccgggggccccgggcgcgccacctgctgtccccggagctccaccagcacctggcgtgccgggagcaccaggagcaccaggagcaccaggagcaccaggagcaccaggagcaccaggagccccgcccattcccggcgcgcctgaagccgcagcgccgccgccgaaaggaaagaaaggaaagagtacaatgggagctccaccagcacctggcgtgccgggagcaccaggagcaccaggagcaccaggagcaccaggagcaccaggagcaccaggagccccgcccgtgcccggcgcgcctgaagccgcagcgccgccgccgaaaggaaagaaaggaaagagtacaatgggtgctccaggagctccggatgcagccgcagcccccgccgccgggccccaagcctcctcctccgctc

SEQ ID NO: 747 - DNA, 992 bp, Plutella xylostella
gggggtatataaaagaagccttcatataaatatttttatatacagcttcaatcttgttaggacataatattatagtgcttatagtacttacttactttattattaatacttaaataaaaacaggaaaaatgaagttacttcgtacatctttcgctttggttctgattggctgccttttacttgaagttcagggtagacccactctaccaggactaggagtagatactatactatcagcaggagtaggagcagaagcaaatgcagcgctacaactaggaaaaggggcagcaaatcaggcaatagaaacaacaaaaaccggagcagaaacaggagtaaaaacaggagcagaaataaaagcaaatgtagaagcaaatttaggagcaggagtacaaaaaggaacaggagcaggagaaacaggcaccaacaccgtacctaatgtcgtgaatggagataattgttcagcatgtggaaacatatagagcggtgcaatgaagaggcaaagttgttaatgtgagaacaaatctctactatcgattgccatctcaacgccatctatgatttattatgtaaaagtaattatttttaaatacctaagtaaaaaataaatgtttagcatcttgaataggtacttatattacttatttttacttatgtctctaatgttggggaaagtaagtaggtagatatacctatttatcatgagattcaacctatccgtgcaacctcatgtaacccatgggtaggtttgtgtacaaataagatacttacataacatcatcatcagccaatggcagtccactgctgaacgtagacgtttcccaaaagcacgcgactggatgcaatctagctttttgcatccaatcaataccagtcaacttgagtcgttcgtcaagacgcgcgccttagactcgcgcgccacgcgagttggcatcttctgtttttttatatcgtcaactcgcgtgcctatataaagtacggtcagatgcaaacta

SEQ ID NO: 748 - DNA, 1471 bp, Plutella xylostella
gagtgtttcgcgaaacgtggttcggataggggcagtagaatatatattatacaaaaaacatattaaatatataattttacaagatagtttaattatataaaaaaaaacgtggacgtctagtgaaaattttgtgaaagccggcaatttttttgcaataaaacgaagaaaaacaacttcagactgtgtgacatttcgccaaaagtgtgattccagctacgtagtgacgcaaagtgaaccttatttccgagcagttttggtgtcttttctttctcaacttttaaaagtatatttacaaaaaaaaaactctattttgtctatgctaatattactgtcgctacaatgaccgcttgaagttcgcgttcaaattccgaatcgtgagtgcggttggcagctgtcaaaatgcttacaatgtcgacgttgatgatgccagctgctaccatgacgactatgacgaacgccgggccgatcccagtggcggcttccacgaagctggagccagctaagctgctgcaactcacgcatccggcgctgatgcagcaacagatgccgcaacaacagatgcagcagcaccagcagcagcagcagccgccgcagaacaatagcaaaatcgaacactaccacatattcgtgggcgacctcagtccagagatcgagacgcagagtttgcgggatgccttcgcgcccttcggagagatttcagactgtcgagtagtgagagatccccaaacgctgaaatccaaaggatatggatttgtttcttttttgaaaaaatcggaggcggagtcggccatcacggccatgaacgggcagtggctcgggtcgcggtccatccggaccaactgggccacccggaaaccgcccgcgcccaaaactgaattgaactccaagccgctgaccttcgacgaagtgtacaaccagagctctcccaccaactgcacggtatactgcggcgggctcgccaacgggctgtccgaggagctgatgcagaagaccttccagcccttcggaaccatacaggagatacgcgtgttcaaggacaagggatacgcttttattagattctccacgaaagagagcgcaacgcacgccatcgtggcggtgcacaacgcggatgtcaacgggcagcccgtcaagtgctcctgggggaaggagtccggggaccccaacaacgcgcaggctcagggacagctaagcggcacaccctacagcccgttcggagctgcctacggctgcggcgcggtccccgccgccggctactggtacaacgcgggctacccgcagcagctgggcgggttcctgcagggcgtgcaggggtactcgtacgctggacagtacgctcagtacgcccagcaccagtatatgcctgctggaaccccattctcgtcatcgagcatgggcggcgtggcgcagctgccgggcgcgtgggcgctgggcggcggcgtgggcggagtgggtgccgtaggaggggtta

SEQ ID NO: 749 - DNA, 1463 bp, Plutella xylostella
acactctttccctacacgacgctcttccgatctctcattttaaattaaatagctttatttcatgaattagttaatgatgttgccattttttggtggtgatcaaattcttggggtaaatttatgcgttaggcgtaatggggctattgcgattgctgcgacgcattggctctaaacaaaaattattattgttatttttggctaatttactatcttatttttttcacggaaacctcataataaagacgcatttatttgcctcaaacggggaaaatgcgtcttaaatcacaatttttttaaacactcaacagtttctaaaagtgagatattttcatacattcgctcccattcttccgataacttttagcgaaaatacaacgcaataccccagttgacctcaaatacctttattatttataacaattgaatagttacttaactatacttaatctaaaactcgtcgtggaatgggtagtcggggtggtccacgtctcccatgctgcacagccgtccgttgcactccagggcgccgatctgctggatgtcagccgctgtcagctggaagtcgaacacttggaagttctgcgtcagacgagccttgttcaccgacttcgggatcacgactaggccgcggtcgatggcgtatctaataagcacttgagcgacagatttcttatatttctcggcaatggccttcaacctcgggtcatccaacagctgggggtcccctggcttggcccagggtctgtcgggggagcccagcggactgtaggccgtcaccacgatgtccagcgaccgacagtactcgaccatcttgttttggttcaggtacgggtggatttcaatctgcatcacagccggcttgatcttagcggccgccatcaccctatccagctggcgcttgttgaagttcgagaccccgatgctgcggaccagcccgccctccaccagcctctccagggcgcgccaggtgtccacgtagtctgatgaggagtactgcaccttgccgttggagtctgtcgggaggagctcagactcttccttataagcctgcggccagtggatcagatacaggtcgaggtacggaaccccgaggtccgcgagcgtggtccgcagcgcgccctccaccaggtcggggcgatggaacgtgcaccagagcttggacgtgatgaagaggtcttcccgtttaaccactccctcctcaaacttcttcttcaacccctctcctacttccttctcgttcttgtagatgtgtgcgcagtcgatgtgccggtaccctatgtcgatggcgtctttcactgcttgctccacttccccggtttgcgatttccatgtaccgaggccaaatgctgggatagtgtgtccattgtacaactttatctttggaacttcacccatattttttaattatacttatttaggtattaagtacttaagtatacaaagtgtttagctcgcgttctcac

SEQ ID NO: 750 - DNA, 757 bp, Plutella xylostella
ccaacactccgtcgcacgacactataacaagtgatcagtcgggataacgtgccacaaacgtacataggactcgagatgtgggtgctagtgttgacaggcgtggtggcgctggcggcggcggcgccacagaaaccggggggcgaccaggtcgtggccatcatcaaacaggacttcgaccaacaagtcgatggctcctacagatacagcttcgaagcagagaacggcatcaaggccgaagagacgggaaccctgaagaaggccagtggacccgacgcgagtgacgtcatcatcgcgcagggagcctacagctacaccgcccccgacggcactcagatcagcctcaactacatcgctgatgacgagggagggttcaagcctgagggagcgcatctaccgacccctcccccgatcccgcccgcaatacagaaggctctggactacctggcgacgctccctccgcccaggaactagaatactcaagacacaccacccaccaccagactgactgccgctacccaggacctgcccgaagtaacacaacatcgtccagtaaacagcacccctacctagcctcactccatcccatgctgtttacacggtgtcaaataaacttttgtacaaaatatgcaacgagaaaatcaaataaaaatgaatgaactgtgatagtgacgatgaagacgaagaaaatgtttgtactttatttattatttattgtaataaagcaaaccagtgcgccaaagatgcattgcaaaaataa

SEQ ID NO: 751 - DNA, 534 bp, Plutella xylostella
ttactgttcggaagtcttttcttcttgatcgatttccaactcattacctcaacctgtttaggtgggttcatcatcttatcctctgtgggtatgaccaaaaaaattataaattggtctcccaatcattgtacttaaatggttcaaaaaacactgagtacatgacagtgacagtattcaagtccgtatctctggcgtgagatgtgaacacttacccgactgagctaccaccgctcttagagaggcgagtgattacccatcttggtctacattggcacctttgtctgttgctattgtagcccatcgacatgcatgcagcaaatgtaaccactgactggcagggccacttcaacttactagtttgtacacctataagtgaatggtctaaattccctgcctatcctaaaatacttaaatatatagacacatcacaacccatcacgtccccactgctgggccacgggtcttcttccaatgaggcaagggtttaggcctagtccaccacgctggcccagtgcgggttggtggaccccaacc

SEQ ID NO: 752 - DNA, 1460 bp, Plutella xylostella
gatacgcagtcgtagacccgcgaaaactatcacagcatagacaaaaaccattgcgttccactgaatttagctgaactataaaaccttgttgcattgcaggaatgctaacagtcttagaacgatcgtgaatattacacaatgtgttcagtgtttgcggtgtttgccctggcggcggtcgccacgggggagattcaaagtgctttccataaagttgagttgtctgatgagaagactccttacgactacgtgaaggaacgtctggatgcgatcggagccgatgcacgatcaggattgccgctttccaactcttacgaggtagaagaaagtccagactaccccgacgaagagattcaaggagcggcgtcaacgatcttgaatactggtgttggtggcataggacagggcattggccttggtggatatggcggtattgggaacattggacttggtcaaggattggggctcggtttaggaggccttggtggtatcggggctggaggtttagggggagttggaggtgtaggagtgggaggcgtagggggcgctggtgttggtggcatcgggctcggtggcgtagggggtgtaggcatcggcaatggcggtatcggccttatccaccctggatacgctggactgggcgtcggcaacatcggtctcggaggtcttggaggtggcctcctgtacaatccgcagttaatcaatcaacaagttggtggtggttacgtagataagaaggcctacgacgaagcccagaagaaaggtgctgatcaaaatgtggagaagatagagaagaaagctgaagaggagatcaagtatgaccagcaagggttccaagcggctgctgctgcggccaagggtgagaagggagactccagtttctacaaagatgaggaagccaagaagaaggcagcaggtgatgaaaagttctatgaaggaggacagaaattcgacaagcatggtgcaaacgaggaagtgcacaaaaaaagccaaaagccacaagaaagggcacgtgagcaagggcttcaaatcttcaagcagcaagaatgaagaggagaaatctgagaccttctacgacgaagctcatgacgaggctgatcacaaggtggctgggcagaatgctggctcgttcggagagaatgctcaacaagggttcaagggtgctcatgaggagaaggtgctggatgccaacgcgcaagggaaggaggggcaccatgtgtccgcgcaacagtttgacgataccaaggctaataagggagaattcctgcaaaaggactacaaagggggtgcagaacagctggagaaatacaacaacctgggagcccactcggtgcacggacatcaggaggctagcggaggcttccagcaaaacaagggaggcgtcctcggcatacattgatgacttaatgataactgttgctgatctgtttggaattttataacacgttttatacatgaaaaaa

SEQ ID NO: 753 - DNA, 782 bp, Plutella xylostella
gcggtgggtcaatgtcgggccgcacccagcccgcacctttcaggtatatcagtcgaggctcctgtacgactttcagcagcttttattctctggggaataagagctattttggaagttaaaagtggggttctagatttcggttgtacggctgtgtgtgtactactttagattgcgccacgcactatctgtggagtgttcatagtattgttatacctatgattaggtaataagtgggtcaccgtgcatcctttgtgcctgcgatcgatgcccgcggcgggagcgacctcgctcagactgcagctgtgacgtcatccagctgtgcgtcactccacactgcaggacaccctgtatactgctggaaaaggtgtggtgtggatggtgtggttgaagtgtatgggagggtgtggaaattaggtagttataggtctagttgtgattgatttacttaaaacaaaagttacttactctatatctttcggttttttgttaataatattattatgaagctacaacgagggcgcttatgtatatataatgcataaataatggagaaacctttttctttcctggaatatttctcgtaaaagataaaaattgttgctagggaaagagcttaaggaaaaccagaacaccttacattgccacacataagagcaacatttgttatttttgtggtatctgatctcctacttacttacatattacaatccattggttggtggaggatacataaaactaagatgataacccgacagtcattataatatgattttacacaaaaa

SEQ ID NO: 754 - DNA, 1482 bp, Plutella xylostella
tttttttcaaactgtcttccgcaacgtcagcgcatgtttatcaaaacaatccacttattatacttacctaccacttaattatcgatgtaacatggaaaatattttcaataactagtacctactagttttgagattatccacggccaaggggtctacaagggttatctcgctcagatactaaagagtcgtccagatggaggtccagtcgatctcggcgggcacgctgcagtccacacagtccaccagctccaagtctgccagctcccggtccagccaggccctggactcgcagccacgggatgaggatttcactaaggataatagcgcctctccaatcgacctggagtgctacatccaggcggaacgcatctcgaagatcctcggcgaggccatcttcaagacgaaactcgcactatgcatcccgcacctagtgcaagacttcaagaatctcagcgccatcttgtcagctcaggatatggaggaactgattttcatattcgagcaatatgagaaccctcagttctctggtactgctatcaatgcagaagctttggaggatattaagtctggtgttatgtcactgaagcatcgtctgaaccccgagctgagccacttgttggcgattctgaacagctacccggacttcaaaccgatggtggaagatattgtgaaggagatgaaacaagaatacgttcaactggaacgcgaggacaagccccagtcccacgggctggagtacctaatgacgctggagcggttccgcgagctgatgcagcgccagacgcggctgacggcggcggccgagctggcgggcaagatgcgccagaggaaggtggaggccagcaatgatggctatatagacaagattcatgaatacacaaaattattgcacgaggaaaatacaaacttcgagaagagtataaaggacaagaaggacattatagccaagctcgaggcggagctgagctggcttgagaacgaggcttctatcaagttgaagaagaaaatactagactcagaccgtcagatggtgctggcctcccgtcagcacgcagtcaagcacgagctgctgaaggatgaagagacggaggtccgcacggcgtacgagaccctgctcaagacacacctagctgatgagaagaaccagcggcaacgcaggttcaaagtggagacgcagctggtgtcgtggctgcagaagtacgacgcggagatgggcgacaagcaggccgagctggacgagttcacggacaagctggaggaggaggagaggaggtgccgggagctggaggagcagctagcagaacaagacaaggcctacctgccgctcatggaggagcgggaggcggagtacgagcaggagatgatgcagaagatgcacaagtttatgctggagcacgcggcccgcgtcgtgcagaccgcgtggagagaggtgctggctaatagggctgagaagaagaagttgagaaagttacagaagaaaat

SEQ ID NO: 755 - DNA, 763 bp, Plutella xylostella
cttggggcgcctcgtttgaagtggttactgttggtgatcttgtatttgctggtaggttctttcatgaaagagaatgatgatggtgcggcgggagtaggcggctctaggtagctaggaagagtcttcccatcagcaccggtagcccctgcgggatgcctagcacttggcggccttttgacattcctgacattattactggcctgattaaacgaatccgggaagtacgagtttccgtacgaatccatcggattgctggcatgcccgtcgtggtcatccaaattcatgttggggtaactattcccgggtatgatgttgtggttttccccaatagacgggaaggtctccagcggtttgacggcgaagggtggggtcttggcgatgctggggcgcttgatgctgggctgcacggactcgaaggctccgttgccgtgctcggcggacaggtcctcgccggggaagctctcggccgaggaggtctcgtgcacgcggtggcccagcggcgggaagttcacgctgtagccctcgatgtggcacgaacagcatgtcgggaccttgaatatgtccatgtgaagaccattctgttggtcccaggtgagcagtcggtggtagttgtaaacttgaacacatttcgacttgaagttgtcagtcaggtaggtgcaggagtcctttggtttcaagcacttctccagccgcagcgtctgcgtgtgctccccggtgttgacgatgtacttccactggccgctcacctgggaccaacagaatg

SEQ ID NO: 756 - DNA, 590 bp, Plutella xylostella
ctcttgccgtccaaggatcgtacaagtacaccgcccccgacggttccgttgtgcagttcaactacgtcgccgacgagaacggataccagccccagagcgacagcctgcccgtgggtcctgagatcccggccgccatcgtgcgctccctgcagtacatcgcggcgcaccctcccccagtcaacgccgtcaggaactgaataacactacggatctcagtacaataacccccgacaggattcacatgattttctcttgtttcaagtctttccagccagttctactgaaataaaaaaagttataacatcacacaaaagatttaggcaaactggatttgtagtaagagaaaattgtggtgtcatccaagcatggaccacaaaatggaaatgtgaacagatgtaaattatatttagtttgtaaaataaagtttatcgtgccatacaatatttgtttttgcttatttgttaccaaaagttctagaaataggtatcgggataagccgttatccgataccatgttgagtttatttttcctgtgagatgtacgacatgttaatgttcggcataaaattcacctagcacccaaggacagta

SEQ ID NO: 757 - DNA, 529 bp, Plutella xylostella
gatcagtttcgttcgtattctcataatccaaagaataatattgtagataataactatttgtagtcttgtctagtcgatcgaatcgcagttctgccgtagcgctgtcgggcgaacattgtcgacgtcgggacaagcttggtggactgtgtctagataatcggtggcggtgtgacgtcactgtcctggctgtgtgacgtcaccggtgctggtggtgtgtcgtcactgctccttcttgacgccgccgttgttgatgatcttcagcaggcgcacgactggcgcctcgaaggctagtgagatcgcgaaggacgccaggaacgccatcaccgcgtagcccgcgtagattattagcaccatagagttctcgagatgcagcggcccgtccatgaggaaggtggtgtacatcatgacggtggggtgcaccaggtaggcgcagtaggtgaggcggctcagcggcagcagcccgcggtacgacagcgccgagttcaccagcccgccgtagccgcagcagcaagctatggacacccatgcc

SEQ ID NO: 758 - DNA, 662 bp, Plutella xylostella
atgattcaagatttagtataagaacaccatacttcaggcttcagtcaccagtctaaggaacttactcctctgatctgaacttataccagcctgatctcgatttattctagtaaaatgttcggtgctcttgtgatattcgcgtgcctggcgttgacccagggtcactccgtggtgccctacgtagtgccggcagcgcacctacatccagcgccggtggctgttgccccataccctgttcttcatcacggctacccagtgccagtagcgaagtatctgagcccctaccaccacatcctgaagaggtctccacactacgcagctgctctagccccagtatcggtctcccaccagtcccgagtggacgtgcatacttcaccagcgctggctccggtgctgccggttgtcaaaccgtactacgcttctcctcttgttcacaaagcggcggtgctgcctgtggttccgccgtacggacatggactgcattatggatctgtgtacccgcaccactactgaaaacttgaagagtctaaataaacgacgtgataaaatttgatctggcatctgagatataaatattggtaattgctttacttatgaatgtaagtagatatatggtatattaataaatgttttgaacattaaactactgagtttcaaaaaaa

SEQ ID NO: 759 - DNA, 724 bp, Plutella xylostella
ggggcagtattaagtatgcaatttcatataaaaagctggcacttaccggtcagtacatcattcgatccctaccgttcggaccacactagtaccaaaatgtgcagaattatcatccttagcgccattctggcgtgcgccgccgccgcccccgggtacctggtggcccaccacgagcccgtggtccacaccgtgcacgctgtgccgtccaagctgaccatcaccagctccagccagtccgtgaaccacggggggcacgccgtgctccacgcgcccgtggtccactctgtgcctgtggtccactccgtgcctgtggtccactccgtgcctgtggtccattccgtgcacaccaagtccacaatcaccaagtcgagccaggtcgtgaaccatggcagtcatgctgtggttcatacgcccgtggtgccggtggttcatgctcaagctcatttagtgcactcgacgcctgtgaagtcgaccgtgactaggagtagccaggtggtgaaccacggcggtcacgcggtggtccacgccccggtggtccatgcccaccatgtgccggtggtccacacccaccatgtcccggtattgtcggtgaagacaggtgactcagcggtgtctcacagcagccagtccgtccacgagactgttcctctggtcgccctccactcccaccattgatgaagattactggttgttgtttgtttataaaagtgttaataaagtgatg

SEQ ID NO: 760 - DNA, 805 bp, Plutella xylostella
gatttgcgtcttttaggttaagtagattacaatatggcatatttttttcgaaataataaacacaaaaaaaaaaaagatatcacgtagttccttacttccagctgttacgaaaaatattttatggcgattgtcttcatcattaattgtaaggtaacgaagtgaatgtttaactgaaggtcggtgtaaatcacacaggtcgttaattattagcaatttaaatgtgatccaatctttttataacgatagttaattatctcattttcattcctatagctcaaacgtctcgagtttactccggtgggtacagttgtagtgaaagcccatctgcgccggcctgctctttgccgcggcggcagcgccatcactactttccttccctccgtatgacgtaacgctataaaagagtgcgcggtcttgaggccgccgctatactgtttccgcacggccggccatcgcgtcctcacacacgggaccaaggacgcgggcggaactcccgctcaggactcagtgaccactagttcaacacaagatacgagatgagatcgttatttctattagcggcggtgtgctgcctagtgttgtcggcgtatgccagccctgtctcccgggtggaggctgaggagacgaaggaggaggcagtggcgcggcaggcggccccggcgcccgcggcgtctgacgatgatgatgacgacgacgacgacgatgatgacgatgatgatgatgacgatgtcggcgatatagttgcaggcgatgacgatgacgatgatgatgacgatgaggaagcggaactcccgctcaggactca

SEQ ID NO: 761 - DNA, 814 bp, Plutella xylostella
gaagtttgaaagaagtcacagtgacaactatgaaaatgaaaattaattaagattgtcaaaagatacatttattatggctgaattctgaaatattttacccaaattcccgttcaacaaaagaaaattcaatgcgcttacaaataaactatgggggatagttcggtgcagatagcacaaactaatagtaaagaaagtacagaaagtaacaggaaagtgagttcagtccagctgctgaggagtcagaccaaggtgagctcagtgcgattggagacgagcaagacacaagtctgctgcaacgtctgcgaagacacagagcagaagccgactagcagcaagtcgctcgctcaccgtctgagccactcagacgcgctagccctagagcgtcaacacaggagcaactgttcctgcactagctcgcgccctgccgtgtcagtccacagcaagcttctcatcggcaagatggcgtcagaccgcagaaaccgcaacgcgaaaaagaggcagccggcccgtcgcagctgccgcgtagtcaagaaacgacgaccgatgaagagatcgtctaggtacaggaagtgcgacctgccgcgccccctggtgttgcagcaccactcccggtctttccagagtctggtgtcttcagctactacagtcagctcctacgacggatgccggttctgtggacaccggtgttgcagaaagtaaatgtcgttcaagtcaaattgtcctagttggggttacaaattgtttgtgtcgttgctcgttttgtgatcttattaaattcatttaaaatataaaaaaaaaaaaaaaaaaagaaaaa

SEQ ID NO: 762 - DNA, 561 bp, Plutella xylostella
gcgtcatcagcgactatctggccagcttcttcctgtggctcggctacttcaactcgaccctgaaccccgtcatctacaccatcttcagccccgatttccggcaagcgttcgcccgcatcctgtttggcacgcaccgccgcggacgcaacaaaaagttctaacgaaaatgtccctactatgtatataactgagcgccgctcgcactgtatggactgttattgtcttcgtgtaacatatttcaacgcttgtatcttgtatgttatacatactgtatcgatattgtatttataaatgtaacgttattagttggcggtgtaaataagttaagttgcggaattgtaaatactgtggattatattatgtacatgcgtataacatactattaataatagatgatgttgagaattgtttttttataagtaaatagtttatgtggagggcgcggcgctcgcgagtcccgggcgccgcggccgccatcttgttcgcagtgacattactaaataaatatttaaactaaattatatttacattctcgagttttatttgcctcgtagtgcggaa

SEQ ID NO: 763 - DNA, 1397 bp, Plutella xylostella
gaagtcctaatgtcattcttgtaaagatcatgaaggaacaaaattaaagggttacaaaataaaattctcaataacaacaatccctgaatgtgattcaggttttaggcctaaacaacaacatttacagtttccaaatttgctgtcgactgaagttaagttgatcgagaatggctgatgataaagaagattctagtaagaaggttaagaagaagaataattctaaatacagttacagtttcggagacacacatcccaaaggcgttgaaacaatactagagatggggtaagaagaatcaatataataaaatatttttaccgtttgtattgatcgaacttccatggacctagaaactctgttgaggaaatacaggtattattcccacattcaaaaggtaaaacaaaacaaaaaatattttacaggcaaaaaatcaaaagatgatggatcaccgacatcaggtagagggcgtagaaacaatactagagatgggaaacgaaacgctagatcccctactggttcatccaaaagcagcaagagtagatctaagagtagagggggaagtggtaaacggaaaaagggcaagaagaagaagaagaagggagccagaaaatgggaggggggacgcggggactctgaggcggatgagccggtcgagcctaaaccagctttgaaggtccagagaaagggagatatttttaccattcaggtgaaccctctgaaggacttaaacgcaatagctccaaacgaagacccgtacgttgattgcgatcctttagttttcaaaatcatcaaaaagcggagtcctgaagaaaaagctaaggtggaagcgcgtaaaatgacaaaactgaagagacaaaggaacgcagaagttcggaaagcgctagctgaagccgtcgaagatatctgcaaatgtgcttacatggacgtgttttgcaacgacttgacggctattgataaagtcatagaaaggtgccccgcattcagagatccagactgtgtgtgtgcaggggaatctttgagctctttgtccagcaatgctacttgggacattgaatacacacccccgtttggatgctttgacctagcgccaaggaagaccaagaaatttgcatgtgttgaaacacagtacgttaaagcagatactataataccagagcctccaccgccgcctcctccacctaaaagtaaatctaaaaacgccaagtccgcaacttctgttaaaattaaagcacctaagaaacacggcaaggcggcatctaaggctgggtctactcatggtccgggtaaaaaagataaaggatcgtaagatcgtttttataaaattcaaatcgtgtgtgtttttatctgaattcaagttggtctaaagcaataaacgttatcaaagttaaaaaaaaaaaaa

SEQ ID NO: 764 - DNA, 946 bp, Plutella xylostella
tttatataataataaaaataaaataaaaaacaatttaaactagacatagaactatactaacatgtccaaaatatacctataaattagaatgactaatgcctatttatttaacctactttttattataataatctttatcttgttgcggctcaggtgagttaaatataattatttttataataataatctttatcggcagatgcactccaaccagtttaccgacaaccttaaataggtatccggcggtatggtgaggaaggccaatgatagtggtgaacctcgccggcggttttgtgaagaaggccaatgatagtggtgaagctccttgggataaggctttgtccaccactggcagattgttacctatagcttgctttcgtaccaccaccgattagaaatgaacaatacataaacagcgtcgcttgacagtcaaacattatgtctgatctgtaaaagttaccgttagatttgacaagcgagcggcgctgcttagtgccaatttctccatttcgacagggattgatttataaattaaacgtcatctccatataaaattcatgacagatgtgtgaaaagttaaccactactccctggttgtgctctaaccgagaaatggtttggtgaagaaggccaatgatagtggctgtgtccaccagccaccgtaacatcaccgaaacattatcaattaacaatatatttataggcatcgtcgctcgactgttaaaatatctatcagattcatacaagttacgtcagttttaaggacgatagtggtggagattcttgggagagggctttgtccacgagctaccgtaccaccaccgacacattggcaattgacaatacattagcatcgtctttcctgttaaacatctgtcacatccatacaagttacgtcagatttgacaagggagtgacgctgtttatgaattgttaattgctatta

SEQ ID NO: 765 - DNA, 603 bp, Plutella xylostella
ggggcaggggtggagccgtacaatagcacggctgtctccaggtgtactggtaagtacagtacagctctacggaattatattgagaactgcctttcattttgaagtcttcatctccttaccatttttctaacaaggacctagaattggctagattttagcgtaactcgctgactgccccgtctgcgcccggcgtatatgtatatgagacgggaaggcaccttaatgctgctatagatagttatgtacctatgctctggtcatgctatccattttgagagactattgaaaaacgacataggtagctgttttttttctgtattcaataactagcatatcccgagagccaagtttcgctttaaatgattttcccgtgggaattcggcgaaaaatttaagcttttatgttctgatgattctaagcttcaagttttatcaaaaactaaacatggttttggcttaaattggtatacaaaactacttactaacttccacggaatattaatcgatatttcataaaatggtttttcccggtaactcccgttcccgtggcaattttgcaatatcatgttgtacctaaacatatgatttttcacactaaaggaca

SEQ ID NO: 766 - DNA, 964 bp, Plutella xylostella
attatggtgggactgatagtgcgagacatgatccaaagcgagcgccaatgatgcgcgctgccagcaggctgcaatacttcaagctgattcatgtccacggcagatgactgccaaatacttcaatcataggagccgaagctgtcgccaacagaacagcacgctcactctcaattgaacctcttgtaaggacggaggcttgcaggatctatcatgtacacttattactctcaattgagcctcccctgaggacggaggcttgcagtatctatcatattaccagctgacccgcgagcttcacttgttttcccgcaacggaagatagaatagaatagaatactactttatttacttaacaggacataagtgatagtttataatacagtggatacgacgcaataggcggccatatcgctaaaagctcttctaggcaaccattgggtggaggagaaacttaaagaataaataagcatccccttatatttttttccactcctctgtttaaggattttcacggaaatccaaattattcgattgtagtacttaagtaataatacccccatataataatataatacaagtgtaagtatataaactcatttagccatatttaaataagacattttaaatatgaacgcacagttggtggcacgcggtctgagagtgctccagcagcatccatcatcggcgacagacgaccgtcgcccgtcgcccagcagtgggttgcccactgaaaaactattctaaaaacgtgtcgcatttttagctctcccacacacagacatacacgcacacatcgtgactgtccggtttttatactgatggacaatatgtatcgagctgctccgaaaggaaacctaggaatttagatagatagattttaaatacctacgtacaccttcatacatatctcatggtgcttatttactagttgttcttttaatattttattacataaacaaacaca

SEQ ID NO: 767 - DNA, 800 bp, Plutella xylostella
cccccccccccccccccccccttcccctacacgacgctcttccgatctttgactttcatgcgttatgcacgagtcatgcatgcatgacatgattatgtccatagaacttcgccggtacgctctggaatacctattttgctagctgtacacagttcgaagaagtccctttttcttaccatttactcccgtagttttatattttcttcaaatagatctcaaagccaagaaacgttactgtctcacttagactccctagggcaactgagaagctagctagcctgttattttaagcacaagtaatttttacgatcaaaaacgtaaatataattttattgaacttgtacccgtaatacctagtctaacctgcccacgtatgaactgatggacaaataagctaccattctgtacgggaggaatgaaatgcctgtttacgtaaacaagtaatttattccttcaagtcctcgccctatttacttaaacccttgaaatgtattatgtacttatagtatacgggtttacttagcttatgcatattatttaatagatcggaagagcacacgtctgaactccagtcacagcgatagatctcgaacccttgaaatgtattatatacttatatacgggtttacttagattatgcatattctaatattttattttggtttcatttgcgtagttacgtacggcttggtaaactaagaacttgtcgatcgcgtagtttatcgaacgtaaaaaggaaatacagtaaaactataaagtcctgaaaacggaagtggatcctaactaattgttgcagacca

SEQ ID NO: 768 - DNA, 1691 bp, Plutella xylostella
tcttcaaaaaccatgaacaccataaacatgtgataaacataaacacacccataaattccaaaagagaaaacaataaatatccacgaagtgcccacgaaaaagccacgaaagataacaaacaaaatattaaattacagatctaaataagatgcagaacttcctcaaataaagataaaataagttcaacagcatgtcatgagcctagagaaaacaaaaacctccatttcccaaattttgcgtggacgtgacatatggcagtttgatattcatccactcacttgaggaaagctttatcatcagtgccttgcattggttattcttccctaaaaaccatggacatcattacatccacagagaaaaaaaccatccataaataccaatacctacgagataaatacctacgctacgaaagaaactaaacaaaatatcaaattacacgctaaagaaaatgcagattttcctcgaagaaagaccaaataacttcatcagcatgtcatgagcccctatctacaaccaccactacacccactacaaccactacctctactaccaccactaccaacatgaatacaacatgaatgttttaagaaccttgtcacaccacgcagcccgccgctggcccgccgcctccggaccggggccctactctggttctcaccacggcggtttgagtgcaagaagaagaagactgaggagtgcaggaaccccatcacaccctgcgatgtcgccttcatggaaccagacaaaaaaacgtgcttcgacatgcgcaacgtgacgctcgagcgcgcctcccagcaccacgggaggatgatcagctcattcctcaacaatcagcactggccgcgcgagcccaccgtcgccagcctgtatcttccaccagactcacggtatctgcaggtgctgagtgacaaatatgctcctgcaggtgctgagtgagaaatatgcctatagcggttagttgattctgattcttctgatgtagagtccacgcttggctgagaaaattattgagtaaatcttgtcatcttcacaggggaccgtctcatagcgcttgaaaagaacgatcgtacggacgagcgtcgccgaaaagaacgaccgcacggacgagcggcgtctgattggcgtagccgtagccaataagatcttcccgtggatggccaatgagctggaggaatgggggcacagcaccacagacaaggcagagcgacaccgcatgttcttccaagcccactgctaccgacatcccaacctgtttaagaagtataaggtggattatatctgggatatcgaggtcctgtgcaccgcctcggaggtctcggggcacggcgtctgctcactgctgctccgtcagtcggatgtctcggggcacggcgtctgctctctactgctgcggtccatgctggaggaaggagtcgacgcgcgccacccgctcgcgcaggtcaccgccactagcacttatttagctgcagcctgcgagcatagtggcatgaagaaagaatggagcatggactaccaggacttcgtggactcggccgggcagcgggccttctacccgaggaagccacacaccagcgtcaacatttacgtacagaagttcaagcctaaagccttctattgcacatgaaagatttatttccatgataatcagcacttgaccaagttacaaataaagccactagaaacggaaaaaa

SEQ ID NO: 769 - DNA, 478 bp, Plutella xylostella
ggcagtaaattactcgaacttcataaccaacactggctacaaacatacctagctctatctacaaagctacaatgtaaactgatgatcagtaagcatgccgcggtgtgaaatgttaagacgagttgcttagaaaatacttttacttgttagcgatagatggcagggttttctacaatgcattgaggcgggtacttagtacctactttcaactcaatatgtagcgccatcattgaaaaatgaaattatggctatttctgctgggtttcgtatcaagtggtaggttggtcggttcttataacggatatacattaattacatataacttttagtatgtgtatgtatacaggttgttgcaaaaacgatataaacgatgtttcggcttagtatactttcctaccctttttgcaacaccctgtatatatgctgcaaatactctgtaagtactctcattggcttcatccagtcatggaaggatact

SEQ ID NO: 770 - DNA, 900 bp, Plutella xylostella
tacaccctatcctacactctttccctacacgacgctcttccgatctcgtttagtttgtagtaaaggttcatattaagtaatcaatcttcagtatcaaaattaattattttgatactgaagattttacttcacttttaatattgtagtaggaattattttgatactgaggattttacttcacttttgatattgcagtaaattaaaatcgggtagtttttttcggttttagcacaaaaatagagtaattttaattaagtgtattagtgattttttgcagacttgttaacaattcgataatgctctaagagcgagctcgagcaccgaacgcaactggtgtactcgcctcatactgatctacttccatgtaaatttaaatcctgtagttcgtttgttctgttttggtgcaaatagagtaattttaattaataataatttagttctgttttttttgcagactttaatgactttgcaattaccgataatgctctaattttgtgagctcaaacacagaaagtaattttatcagaaactttaaaaaatactttagttgtaattttttatttaactacatgctttaaaaaaaatctgcctttcttttcttctgtctcaagctcgcgaacgcctggctgacagaagaaacaaagtcttttcgttcataatgtcagacgtacgtggcacgtcggtaaagtacaattgtttttggagccttcatagtgatgtgaaaattaaataactaagtatatttgagtttcccgaaagaactattaactataatgtggcaagagtaaccctttttattatttggtaacaactctgtacgcctaattagtatgattggtataaattaaaaatcgatagtatttcttgctaagtgttaattgacaatgcgcgcggtatcca

SEQ ID NO: 771 - DNA, 5216 bp, Plutella xylostella
ttccgtgtcatccatcgacccgtgatcttgatacgagaatctagaccaggaacttacttaacagtcaataatcgtcgactcatcttgtcgggcacttgcagcgaagtttttttcgcctgcaggtttacataatagctgtgttgtgtgaaggttggctttctttcgccggggataaacgcgcggtcgtctgacagtcgatcgaaagaagcgcggcaacgcgcaagtgtggtgcgggttttgacactttattttttttaaaccatagtgcaagtgagacagacattcggataccatgaggctgactttttgggtcacagccttggctgtactcagcgtgacatgggccaaaaatacaacatcaaacgcaaaaccgaaaagacaacttgacaacattcgatcacctcaaaacttacagtactccttagtccttcctcactcaagagttaccagctttaggtcactaaacaacaataatagaagaatatcccatggacctcaaggcagatccgctaaattgccaccttatgccgttcagatggagccagtagttcagtattctcaaaaagaccctctttatgatcctacccttgaaaatgtcgatgatgatttgaacagaaatgaactgtacgctcaaccgaaaattatcagtggtggagatcaatctggtgagggtttgtatgggccgccatatggctctttgcctacagctccgttgtatagccatgagccacagcagcactactacgaagctccagaacctattattgagattatcatcaaagaatcgaacgaaacattaccagcgccaccgccaacgcctattgttaaaaagaaaaaagaacctgtgcaagtgttttatgtaaaatatagtaaagatcctcatgctcatgataaagtagtatatgataaaccagtaccggcaatcacgccgccgtctaatattgaagatgaacacgaacatcatgaagagtacgttactgttactcctgagccttactacattcagccacagactactaccttgagagcgattataaagcctgactctgaagtctatcacagcgagagcagtgtaaaagtaacttttggtaatgagggtcatggtaatcatggtcattacagtgacagacgtgagagcaatggaaataacgaagaccatgaagaaaccgcaccaaggccagcaatcgcataccctcaacaacaaattcatcaatcgcaagaacgaactgctcaaccgaataaccactttcacgaaactgtccaaagacctccatcaaatccagggccacaagtatataggcctgtgcaaccaactcaacatgcccaaagcagaattcagttccaaccaccatatttggccaatgaacagcagttaccaagacaaggaccatcaattgcaccgtttagaggtcaagttgctcgccaaaatccgttcccgacacagttaggacctctttctaatttcccagggccggttgctaattttggaaacagtatcccaactgtggctggtcctgcccctacctttgggcctcctcaatcgagacccaacaacggcgctccatcattccatccccgaccgcatagccaaccccccttcgcaccaagaccacctaatttcaatggacctcctagatcaaccttccattctggaccacaaagaccattccatcaaccaccccaacagccattctttgacgaggccaaatatttacaagaaaactatcacaccattactaccgaagatgttgaatctcccaaagatcagcaattaaacataccaacgaccggctttaatttcctgcctaaaccaacgcccacagcaccccaattccaagacaaacttagaccccaacctgccatacctactacccaattgctaccacaacaacgacctcctcaacagtttgtcgatacaactcaaaacagaccctcattcgctatttccccaggccgtccttctttcttcaacctaaaaccagccccaccccatattgaagaaaatcgaatcccattccagcatggacctccacagcaacaatttagtttccaccaaggactacagtcactgtctagaccacagttacctttacaaaactctccgaatagattcttaggcccattagcggcttcaccttcaccacagattataccacagactcaattcttaccccaaccatcttcccctcctcagttcaatttccggccacagccatctcctgcccccgaacgtaatcaattccaacagactggacctcaattccagaagtttaacaatccttcagaaagacctattggccaaaataacttccacgatcaagctaatctacagcatcaacaaaacgttggtcagttcgtgcctaatggaggagaattagtagcagccatacctaaatatgagcaacatattaccataagtggcccttccagtcaggcagactacagtggtctcagtcagcagagccaatctagctcatcgataaatcaggctgagcaacaataccgtcaacagcaagagcaaataagacagcaggaacagcaaaagaatgaactgcaaaggcaacatgaacaacaaaggcatcaggaacaacagagacaccaggatcaacagagacaacacgagcaacagagacaacaagaccaacagagacaacaacatcagcaagaacagagacaacaggaacaacaaagataccaggagcaaaacaggcagcaggaacaacaacagcatcaggagcaacagcgtcagcaatataactttgacatcgaacaagaacaagtaaggcaacaacttgctcaaaatgtgcagaagcaacaggaagagatacaaagattgcaatctcaattgctgcaagctcaacaacaacaacagcagcaacagctacagcaacaacaagatgctaatcaattcgagcttaactatagacagcttcaaaataattacaaccagcaacaagtacagagtacatctcctaaacctcaatacaatcaggagaggtcaaggccagtgagctaccaacccacgtaccctacaagtactgcctctccaccgtactaccaatctacatctcgtacagttgagatcaagcctacgaccacaggggctctggctattttattgtattgtaatgtttttgaacaataaactattttcattttcattttcatttttcattttcatcagtgtaatcaagatttacgcaacaaaaatttgttaggtggtcaaataatgcaaactcgacaacaagtttaggatttgggtttttttcgtatccatctataatctaattcactctcgtttcaacaaaaatatgtatcttcaaccataaactcaataaatccagcaaaaatatgtatcttctaccataaactcaataaatccgacacctgaatcaaagaaagaagctaaaaagcagaaaaagccagctttcgaattgccagatgaagtcccagatgaccttagacagcaactcctatcatccggtattttagataacgctgatattagtatcttggattatgacaaagttggtgaaactccattagaatccttaccaccagaccagctagctaatttcttcagtgctggtggtggccaacagattgctgctagtgaatcaaggcccattgttgtgtcacctaatggagaaagaattcagtctaggattgatgatgaaagtgaagatgatgaccaagaaattgctgcatctgaaaatattgctcagtatgaagttccgccaccaaaaaaatacaaacagtctgttgaaatgaaggtggttcattttgatcctcaaactaaggaaggacagaaacttgccaaggattacgtgaaggaagatgcaacaagacttgaaccggttgctctcaatgataagaagtacaaccgctatttgcctttgaaagtgagtggcaatcaattccctctgcctgatattctaaaaggcagaaaggtaacatcggtggttgtattagccccagtagaaacagaacttttaaatggtgatcaccaaagaacagaaagagctgctaccactaacttaaagggcattaaatttattgctggagatagtctccaagacttgctgaagaaaccaacgagagagaattatgaaaaatggctgagaactgaaaaaagcactgctgctgatttacagtcagttgttctcctagttactggatccgatgatgaagaagatcaatcggcaaacaaagaaatctacatgtacgacattgcatcaggcagtgtgaacaaactggatggagagctatctaacgcgtttgtagaagcagcagaaaataatgctttgagtaaagatttcgaaaaaatcgccatagaaggggaaggaactcctgagagcttcgacaaaagtgaagacgaaatagttggagaaggttcggagaatgtgccattactagtagatatatctggtctgagtttagatcaggaaaacaaccatcaagtatcgatatcatcaggatacagtaaaacgaaactgggcagatcattacggaaacactgacatgaatgtgagacgtccgcaaggcgttattataatttaaccttgtaaatagcctaggtttagtgaatttctaaattaaaactgcgtgatgagtattttagttgagctattacgaaagtgatatctggttgtacaatataatgtacgttatttttataaatatcagtcttttatttctataccttatctttccttatctaaatcttcatagtcaagatattaataaaattaatatattttttgttattgagttaatcagtaactatatcgtttcatatataagtgctctaactaaattcctatacagtgcatcaagtaggtggttacgccatctgttgcatttatagagaactgaataaagttagtaggtaggtacccgaaaaataattacataacaccagctaaaatatttccatctcttttattttgcaataataatactgaatacataggtaagtatatcagtatattttatatacagtcatatcataacataataagtaaactataatatagttccgtgaagacttatcaccattagttatattacttctaaaaaataaagattgttttataatatgaatatcatttttggatttttgatacaacatgaacactttattagattaatgcatgtttttaaatattataataaatttatttagttaagatacttactgcgccaatgccaccata

SEQ ID NO: 772 - DNA, 453 bp, Plutella xylostella
gatacggcgaccaccgagatctacacatagaggcacactctttccctacacgacgctcttccgatctcctgtgggataaaagacatgctgtcactccctgtaattaagttttagacagttacacagttacagcatgtcttttatcccacaacggtagccagtcagttattgcggtagttgagatggcgcgggtcgtgtttatttgtcttttattaagtgttttggctgtggcggtagccgttaaccagacagtatgaaacaggcccttagcgtgatgcgggacagtgtgaaaaccgccttatattccatttcacagggatacaaacaaaaactacttttattcgaatgtaataaggcttctgtcagatgtctttccccgtgaaacaagaaagaaacagcagacctagtccaggagtatgggtatagtttatttcatcaaacattttgtttctg

SEQ ID NO: 773 - DNA, 911 bp, Plutella xylostella
ttgttttaggtaggccctgggttgctcgtagctcttggaagtaaataagctttggaaatatgtcagactgacagatacaagacaaaaaacgctcatttttttaaaaaaatccgaaaaatccatgaaaaatcctatttttgtataaatacctaattattagaaatatttctaaaattcatacatagctaaaatatctacaaaaatgccaatatactacggaggctaccccggcggcccagacgcggggggctactgcttgttttcgtaccgctgctgcaaccccagcatcgggggctgcgggcactggccccctctgccgggggctaactgcggacccccttgtccaggaccgcggtgttgaattcggtgttgaatctcattcttagttttctgtctcttagaaattgcaatcctcattcttgattttctgtctgttagaaattacaatggttattcttggttttcagtctgttagaaattataatctgaagaatagtcatgtcccagatcacccactaactcatgtctgtctatgaataaagtttgatatttataaaagctatgaagaatagtcatgtctttttctattaataaagtttgatatatttattaaaaaaaaaaaaaaaaaaaaaagtttgatatttataaaagttactttttgtatttattttctgggttagcatagaatctaatggatctaatgagcagttttttaattgatattcattcactaccaatgaattccttatctacttacctctatcccccatccccatataaatacttccctgtatttagagataaaagtttactgaccaactttcttagtaggttctagtacggtaccgtgatattttgttagctcgttctatacttaataaatactggagttactataaaagaaaccatga

SEQ ID NO: 774 - DNA, 438 bp, Plutella xylostella
ggacagtgcttgttgaaaattggtgctgtgaaaaactcaggtaagtacctacattacttaaaggtcttccaataaattaatggtaactgaaaaattacaacttaggtacttacaacgttaaatatttacctacgattctatgtacctaatatgttgcttgtaaacaggaaaattacaacagaggtaggtacaacattaaatgtacttatgtagttacctctattacctaaatgcggtaattaactatggagagtgcctgtaaattttattcttaatcccagttgtagagtttttttttttgttctagacgagagagtgccattttattgttaatcctagttgtaggtatttttttattctagaaagtgtttttctttgcagaatgaaaatcttcatattactagcggtagtcgcggcggcgaccgcctccagcgtgca

SEQ ID NO: 775 - DNA, 471 bp, Plutella xylostella
cccccccctccccccacacgacgctcttccgatgtggcaggcgtgtggagacggggcggcggcggagcaagccgcgcgccatccagcacggagagtacccgtggcaggcgcatgtgtttcagtacgtaactacctacttagaatgtaacttacctacctgcgtacctacattatcagtcaataaaacagcctgtttgtctactgctgcactgctgtttgtcaagctgtttgtgttgtaggtacactttgatattcttaaataacctttgcggtaagaaattgtgcggagcgtaggctgctagccagcagattggagctaaatactgcgtgttttgaaactatacaaggccagaacgcagaggttgggactgctcgcgtaggtatattttcaagttaaaacggtgccatgattcacttgaaagtatacaaggccattacgcactaatcgcgtatattttcaagttagttggg

SEQ ID NO: 776 - DNA, 769 bp, Plutella xylostella
cagttaatcaatcaacaagttggtggtggttacgtagataagaaggcctacgacgaagcccagaagaaaggtgctgatcaaaatgtggagaagatagagaagaaagctgaagaggagatcaagtatgaccagcaagggttccaagcggctgctgctgcggccaagggtgagaagggagactccagtttctacaaagatgaggaagccaagaagaaggcagcaggtgatgaaaagttctatgaaggaggacagaaattcgacaagcatggtgcaaacgaggaagtgcacaaaaaagccaaaagccacaagaaagggcacgtgagcaagggcttcaaatcttcaagcagcaagaatgaagaggagaaatctgagaccttctacgacgaagctcatgacgaggctgatcacaaggtggctgggcagaatgctggctcgttcggagagaatgctcaacaagggttcaagggtgctcatgaggagaaggtgctggatgccaacgcgcaagggaaggaggggcaccatgtgtccgcgcaacagtttgacgataccaaggctaataagggagaattcctgcaaaaggactacaaagggggtgcagaacagctggagaaatacaacaacctgggagcccactcggtgcacggacatcaggaggctagcggaggcttccagcaaaacaagggaggcgtcctcggcatacattgatgacttaatgataactgttgctgatctgtttggaattttataacacgttttatacatgaaaaaa

SEQ ID NO: 777 - DNA, 2828 bp, Plutella xylostella
acaatttctgggactaataaaattatataaattttactttgaagttgaacttacctacctacattatacaaagaagttatatgtaaaggtaaactgacactaaacctacaatagttagttattaaaatgtaggttattacatgattgtagcataatctataaatattatcaattaacaattatttaatgttgtcttcatctgatgatgtattgccaaatatattaatacgacaaaagtacttcaacaaaagttaatacatcagtagcttaatagttgggttgttttacaacaaaaaattatgtatgtacttaaaaagtacatgatatttcttatataaaatttatttaaaaatattcattggtatgctaataggcatattataaaaccaccttacatggtgagtaagtacacctacctacactatgaggtgaggatcagattatattaaaaatacatacctttaaatgttatatattaaaatctggtagtttaaaataacatacctacatggctccattgtttttatgccagctaggcattgtgtagatatttatgaaaattattaatgttatcaaaacacgaattatgaaaagtaaatggatagtaataagtacactgaccttagttttaggaatttggttgacttgactaacgtcgtcagaggcactataatattttagttatacctttgtatgtaattctaattaggtacctacctatgtatgcagactcgtgtttgtctaaatgtctagtcagaataagcttaagaaaacgcacattaaattcggccattttaacagggatatatttttcctttttacagcgtgtgacgtcaaacttataaattacttctagtatttctctggtccataataataatgaacaaaaatcaagctcagtgaaggagacttgagagatgacctagtcgtcgtatgtgtatttaaaaacagcatttttatgcacccatgcatttcgactataccacttagtaaatattaatgatattaatcgctatctattatatttcataaatatgcaatgatcaggaccttataaaaaaataacttacctaagtattttgcttattcagtgataattcagtcattttatataggtaagtatacttagttaaattcaaaaatgctttctatacttacatacattcgaacaaacaatattatattatacttacaatttaaattaatcgaaacgattattatgaatgaaataatgaaatattttgcaaagactgaacttcagaaatggctaagcatagtaagcattactacagcaacccccgcatttaaaaagaataagattgatacttatgaactaaattaagggtaggtgcatacctagtatcaagtttaaagatttggccggtatttaaggtaataatattataatgtaaaatacagataccaaaagaaattagatagcatctagctagtgggaccacagcgtaaagtattatgtatcactttggcatataaaatgtatttatattttatttatttgtttaatcttttcaggctggacctaatacgataaaaatgcataaccaattaatgatttagtccacttcgtaacataataattgtatttttacaacactcaggaaaacagataattatgtatccctactgtgtatttttatgttttgtaggttttctttgtaaagtatttactgaaaatcttcctagtatacccttacctacccattttattcagaatgttacgtgttacttatagataagtaggtagcatgcaggtaggtagacaattctttaagagtcatgttttttgttgttgtaagtaatgtcttgattcttacctatatcgagtgaatgttctgatcgatataataataatcatcataatcagatatatattttttcgtattatgtacctacctatacctagtgcacctacttacataggttttggtaacattctgtatacctaagtaatttaggttagtatttggtgtagacagtaaagaaatgatcaaaatcctaatttgaatgatactgtacttaaattacttgttgtaggtagtttcacacctactttataaaataattattcaagtacttaagtaggtactttatttgtacttataaataatcataataatttgtagatatcccaaaaaatctatagtgtagttagataattgtagtctgtaggatttctttctttcatttagcttagtctgactagccaaatagggattcctatgtaggcatgaatcgtacagtgggacgcaggtaatatgatacactatgggctacgtataagtactacgtacttattcgtcattgatatgcctattataaatctttaattaagtataatatccagggtatcgcaaaaatggtataataagccaaaagtgggtgagcgggtcattcagaagggctagtacctacggggcgcatttaagacgtgacaaaagttctccgttacgctcgctcttgaggcttcgcgatgtgagtgatgagtgagggcgatgcaaaacttatgtcaagtccgcccgtgctactagtcctgaacctctcttattctacgactcaaaaaaaagtgtttttttttgcttaaatataagtatcctattgttactcacctacttatgtaccatttttgcaacaccctgtataagtgttatttttaaaacagaacacgttaacgtgtagcacatgacttactgtactttcttaaatgttgcttatttttatttggatgcattgtttagttttcacccataagtataattgtgatgaatgttttgttagataacaataaagatgtatcagaaaaaaaaaaa

SEQ ID NO: 778 - DNA, 620 bp, Plutella xylostella
ctaagtacttacctaattagttaccagttaccgttttaattagttaattagatacttacctatctatttataattttatgagaaattaggaataaatcagatataacttattaagctcataaacaatatattttactattttccaatgaaggtcatccatcatctatgtagttatacttacaggactgtacctacggtacacaacacacatagtacctacacaattacacataaggaaactatgtatatttctatggaaaaaacaaataccattaaaacattgtatgaccggtttgctgattgctatacttaactaaacaattatgaggatcaatatgtacccacctacctgcgtagataacatcatactatattatgaatatagtgtttatatataccatattctaaacatcaacgagtgtattggatgatgtaagtaacatgtaacaaaggtacaatatcgaagacaatcttgaatcatggtctaaactctaaacgaataaaaaacaagtgaaataagtactttagacaaacaaggtgggtagattttgattattctagagctttatggcgtttacttgatgtaatctccagtgaccggaagtaagaagtaaattatt

SEQ ID NO: 779 - DNA, 732 bp, Plutella xylostella
ccccccccccccccccccccccacgacgctcttccgatcttttttttttttttttttttttttttttaaatgtttaaaacatttattaatataccatatatctacttacatacataagtaaagcaattaccaatatttatatctcagatgccagatcaaattttatcacgtcgtttatttagactcttcaagttttcaatagtgatgcgggtacacagatccataatgcagtccatgtccgtacggcggaaccacaggcagcaccgccgctttgtgaagaagtggagaactgtagtacggtttgacaaccggcagcaccggagccagggctggtgaagtatgcacgtcgactcgcgactggtgggagactgctactggggccagagcagctgcgtagtgtggagacctcttcaggatgtggtggtaggggctcagatacttcgctactggcactgggtagccgtgatgaagaacagggtatggggcaacagccaccggcgctggatgtaggtgcgctgccggcactacgtagggcaccacggagtgaccctgggtcaacgccaggcacgcaaatatcacaagagcaccgaacattttactagaataaatcgagatcaggctggtataagttcagatcagaggagtaagttccttagactggtgactgaagcctgaagtatggtgttcttatactaaatcttgaatcataagatcggaagagcacacgtctga

SEQ ID NO: 780 - DNA, 5630 bp, Plutella xylostella
aaacacaactggcgcggcggcaggcgcagcgcgccgagctgctgcagcgcgccgaggccgcctggcaggacctcgagcggggcttccagaagaaactgcagctctctaaggaaaaggaggagaatatcgctaaacagctggagcatgtagaagaagaatacgaggagtacaagaaagtgacgagtgagttggatgaaaacttaaagacccggatagccgcggtggaggcagaaaagagcaaactcatggagatggagaagtctatgtgcgagctggcctgcacccggcatcagctcaacgaggatgcgaataagaggaaggggacattgtcgaagcagcaatgcaattgcttgcagtatgaaagagacaatcagttcaaagaagagcaagcaaagaacaagatgaacagcgtgaagaatgacctggaagcagccagactgctggcgctggaggccgagcgtgtgcgggccaaggagctgaaggacatcaagaactccatcacacagaccgccgccgctttgaaacgcgaggaagatgagaacgacactcggacggaacagttggagcagctgcgcaagaagaaggagcagacggagaaggccctcggggagtgcaagctggcgtgcgagaccgccgtgagcgaggcgctggaggacctgcgccgccgccgcctcgagctgggcgacatgcaggtgacggtggcggagtgccgctgccagctgcccgaggacgccgcggtggaggcgaagcgcacgccctcgctggccgtggtctgctactgcccacccgatgggaagcccttgaaaggttgttcatgcacgaccctacgttgccggctgctcacagagttgctgcacagcctgtttggaggccttcaggaggagctcgggctgacgggctcctccatgccctgccagctgctcaagtgcctcgacgacaaacacaactgggaccgcagcaccgacctcaagatacatttgaagaactacttcctgcaattgctcgtcggcgaaatggagatcgctatcgctgcgtccattgaaatgtatcatgctaagtggatcggcgcgtgctgcgcggaccgcggccccccgtgccctacgtcgtgccaggcgttggaggcgcgcgcccgggagctggccgaggagctgatgaagcagcagtccgccgcctcccagtacagctgtgacccctgccgctgcgacacccgggtgtacacttgccaagtgcagccgcagacccggagccagggcacaggcggcggcggcggcggcggcgggccgggcggggcctcgcgttggcgcaggactctcaaccacgtcacgctgctgcgctcacagatcgaggacctcaaaagggaatcaattaaaaagacggacttaagtttaatggaacaaaagattgtgaaattagttcagcgtgcttcgggtcctaatcgagcatttaccactttcaataaggcaagtaaggagctgaaacgaaatttgcgatgcgaattagaacatgacaagattgaagctgaagggaacacgcgagacgcaaagaaacattcagtgaaaatggataaaccaaaatatcaggcgaaaagttccaaagaaatcagaaatgtgaaagtaaagttgaatcggtgtgacacaaatgaacaaatagtaaaattcaatgagtttaataaagcgagtatgttaaagaatctacaggtagaatgtggtggttctaaacgtagaaaatctatgaatcaatgtaaaatgggtgggaagaaaccggttaccgtaaatatgtgttacaccgtggagaaagatgatcgtaccttgatggaagcccagcctgacattccttcagatgaagatgacataccagtatgtgaaacaacaacaataaatacagaatcaaacatatcttataatgctataaatacaatagaagcaaacttacatagaactgaatcacaggaaagaaaactatgtgacgattcatgtgtttgcttcaataaaataccggctagtgtgtcaataaatgaagtattaaaatctttgtcatatctacgaaaaaatataaatgcacatgttgatgacactaacgatgactttcaagaaacgttaaaaacacaattagctagaaaacagaatgatcaaattactctaaaaagatcagaaagagacgattgcgattttaatagtaatactgtttcaatattgcctataaaccataaagataatattaaatctgttagtgattcaaaagaaatcgtactgaaatgcaatactggctctatttcgttgaaaattccatctgagatacctgaaaaagacatactagaaaacgaacgttttaatttaaagctacctacgaatgaatcagttcgtttagcgacttttgatgttcatagttcaaaggaaataaataatcaattacacctggacactttgaatgaatttgctgttccattgataaaagtgagcaaccaaaaaaaataccagaccgattcgaataactttttaaaagttttaagtccaatgtcaatcctttctgaaaaatctaaatatgtttcaaaaaataatataaacaagtctgagaacattacaagtaagtcacatgaatccggtaagaagaatgtaacttcgagtgacgaggatatgcttccaaacttcgaaacacaaaatgaaattcaagaaaacccacctacaagtatttgtagcgagaaaaacagtaatgctataacaagcttgattgattcgacgaataaaatgcgccagatagttaactgtgtaagtaatagaagcaataggcattcagatggatcccaaagaaaaatgaatatggaatctgattttaatcttaacattgtaaatcaggatagaatatttggaattactatggaaaataattatacagaaagaaatcaggcagcaccgacattagatgatgtaacccacagtattgatggagtagcaaataagatagttgatgatgattattcaataccgaattttgatacaaacgttactgaagataaatccgctaatgttaagttttcaacggaaagtaatttagacgagtcggggaagcaaaaaaacaaaaatattgataaaaatggaatctcaaaggggatttctgctgaacctctgtttacaaataacgaaaataattataagggtaataaaaatgataaaaattgtggaacagaatcagaatacatgggtgaaataaatttagataagagcatagaacataactgtaggtgtggagctgactatgattttaaatgtataaattcaaaactaataaatgctactaattgcaaatgtgagtatgaaaaacaatctaaaatagattatgttaaaaattctaccgcaaatgaggtacttttggataacttacctgttaacccatttgtttctttgagtgcaccaaataaattaccagaaaccgttaccatcgatgacataaattacaacattaaaatgaatgaaaataacagcattaaggaaacaatatacgatgtaataagaaaatctaatttgtttccgtctaactatgattatgatgttaattttttgggcgttacattaaagaacgacaaatgtttaaaaccatttaaaactgaggtattggatagttatagagtaaattctggaagtgataataataaaaaatacagtaaaatggttccttttagtaataaaaaatgcactcataatgtcataaacaaggccgttgtaaccgatataacttcaaattcaaatgagaataaaacttgtaattgcaatcaaaaccttaaagaaattgaaggaatggttgatagaatatttttaccatacaaaagaaccaagcagactaaagatgaagctctagacacccaaagcctaatgagagaatttgaagtatactctcgtaaagatgagccatgcgtttgttgtgataaaaatttcttaaaagaagaatctgaaaacttggaagttaatacttatgaattaataagagaacatttaaagaaaaaaatacaagagtttacaaggaatgttaattacgaatctaatcgatcatgtatttcaaaagatgaagaagaaaagttattgacatccattttacataatgtgcaagaagttatattcaaaaacactaatagcataacttgcaggtgtaatacagagatgcaaatggaacatagttggaacagagcctatatcctattgcaagaatatttaaaaacaaaaattcaaagagttcagtgttcctgctctaccacagtagaaaatgatcgtaatagtctgaatgatattttaaacaaagtaaataaacatatagataacgactttgaacggcttaaaaaacgttgcaagtcagaatcaccaaagcaaaatattgaacatactcctataaaattagagaaagacaatattagtcaaacatctaaggttatcgcgaaagactgtaatactactgatgtaagtgctaaaataattcaaaatgcaatcgatgaaacaactcaaaagtcttttgtgaagtgtgatgtcccatctcaagtatcgaggtattttgatgcccaaaacaaaggatgtgatgcattagttttaacagttactgataatgggaaccaaagcagtcttgagtttggatcacaggaaaaagaacgtggtagtaccttttttgaatgtttatgtgcctatgataacagtactcaaccaaatcacgaagataaatcccatgttattaaaaaagaaactgataagtttgaaagtaaccggcattgtaccgaaattattggtgataatatagaccgagctttagccctaccttatgtaggttgtactattgaatgctcttgtgataaaccactcagtcaatgcgattgtgctaaatgtgttctccggaataataatgataaaacttctaccttatacaatcactacttagataaatcacttccacaaaatgtagcttatattatggataatgcattaaatcctactgataaaagaaatgttaatgatttatttcatgatgaacaattttgtaaacaagagtacaaagcaattgctacagaggttaaaagcgtacagtatgtttgtaacacaagacgtaacacgatgactagtgtgagtagtccagaaactatgatactaaaagattctagtagtattaatagaagaaaaaaactaacgactaacacatttgttcagaatgtttttggtagtagtcccagtgccgttggtgatttaccgcttttagagaacgtggaaagtgttcctggtgatcctttatatttcccgataggctgtgaactatctgaggttgcttctcagaattgtgattgtaaaactgttccaatatgccacgtcaagatgttagtcgaagatattgaaaatagattagcagactgtaaatgtgtttgtgactctctgattcctaaagtatgcccagtacattctttctgcaactaaattactgtacttagtgtattttttaattatgtgtattttattattttgacaatatgctttttcattgatatttatgtaattttagggacgtttttggtgtgttaccttacttatttaattacgtaagtaatcgttaaaatatgtgcgatagtaaaaatatgaaaccttaattaaaatcgtaaccgtata

SEQ ID NO: 781 - DNA, 1843 bp, Plutella xylostella
agtcatgcgatcctcaatgccatcaacatgccacaaaccaagattttccttgcatagccgattcacttatttatattagtctatggtttattatgaactcctttttctgagacaatcaggtcaaatttgatgtcaaaacatggaaaatatgtgaattaaaatttttgtgcataaattcaacatcatggattcgctaacacggagaatcaaatcctcaaacatcccgtctccggtgaaacgcgaactgagaaagcaaaagaaatccctaagcaatggcgaggtacagatgaagactatcaagaaacgaggagtgtatgtggagaagaaacctaacaaaatccctgcagaaggcaagcctagaaaacctacaaaacaattcgatgaagcagctgatattgagacaattttacgaaacctatcacagtcccagggttcttccatgtgcgacaaggatccctcaaccgattctctacctgaagaaggatatccaagaagaccaacaagaaaacgaagctttgacaatgacgtaatagacgctcgtggcatattcacagaagaaattaaaacgaaaggcacaaccgtggagaaacaaataaattcagaagttaaatacattatggagagccaagatagatcctttgtagaagaattggaatctactgaaccgttgaatgcacgaacaccatcaatatattcagaagctacttatctatccaaatatggtaataatgaaagtaccagcgatgagggtagagaatccatgaaagctgttatagaacagacaatttacaataacatcgctgatagacttactgatgcagttttcaatcgtcagctaatcgctacaaaaagaaaaaaagaaaatggtaaaaaaactgaattacaccaaccagtaactttggtcggtgcctgcgaaaacacagacagtctttataacttatttctagatctgcttaaaaataccattagcgtttataaaatagctaccgactacgcacatgatgggcaaaacgagtcaaacactgctatcaaggaaaaaaaacccaaaaaggtgaacgctaaaaagaaatctgcatttggacgcaaaaccaaaggcaccatcaaaacaactaacaagactaaaaatactaatacaagttcaaaaatatgtgaaaagcctctattacctccagttggaaaagtctcaaaatcaacctctcctgccacatcttcgttatcatcgaaaaagagtaaaataaataaaattaacaaaccgagaaataatgtccgcttcccgcatctcacttacaatacttaccctgttattaacatggctgaagaaccaacggtaaagccagagatccaaggtatccggaaacaaacaaaaatgatcagccgaggtgataataaggaggttaagcccaaaaataaaatgtctttattgcacactttgaaaactcagctgcagcaagatttgttaaaggagccacagaatttgtttgaagccctcctgttgatggcaaagaacaagcgaaaaagtacttatacttaacactgataatgatgaaacatgagagccgttattcttgaaaaatctttggataagtaggttgcaaaccaagttagaggttccagaatgtgcggtagtaataagataaagatatccaagaagctcatcaaaatgtaggcaataggtagtatgtatagttaggtactacctacagtcctgacaataaatagtgcgattttgctaagactttataattatcagttattatcttacatttacaatacaatacactttatttgcaccaagaacaaaaattacaaaaaaaacaaaacttaaaaataaaacaccacaaaa

SEQ ID NO: 782 - DNA, 800 bp, Plutella xylostella
gcataattctatgacaatgccaaccctcgattccctattgcagacccttaaagttatctgataccaattttattaaataccttcattgtaagtattggttccaaaatattctttaacatttactttgtataaatgttctttcccaagtaggttttccgaacataaaaaaaagtttatttaaatacagcaaggttaaacgggcgtaaaagacgatggtaatacattacgcctgtttatgtagattagtcccttgacctatttgttagggtctggacccatccgcaaggtcacatattagcggccggactcgggccgctttcattattatattgctcattttgtaggcccatcggtgggagctgtttcaacaattattcgggctcacctgccaagttttattttttctcacaacattcttttgaatatttgagagcatttcaagtagccgcaacaaatcgtaacaatctgtaaggtgaagaattctatgtagccaccactttttttcccaaagtttcacattaacaaattattatcttcagagctataagtgcaaattgaaaccctttaattaaataaagtccacaactacaagtgcaaaaaactttactgaattatgtgaaattaatattgaaattttattaaaaataatgggcacgacaagcacacgctgtgctacgccgcaggcgcctcgtgtggcggctgctacgaacctcgtagctcgtagcgcgtagctcgtagctcgtagctcgtagagaataatcattttgctagggacactgagatgacgtaatttgaagtct

SEQ ID NO: 783 - DNA, 1567 bp, Plutella xylostella
ctgtcaaacgcctacaaaatctgtaaaatttcgttttaaacacttgtttaaagttttttgtggcagtgcagtaaaagtcgcgtaacttttgaactgctcagccgattttgataaaataagactaaaatcacttggggtaacattagttagttattagtttttgacaacttacgaacagcacagaatgtctttttaaaacaatcatttatttataatgtcgcaagcatgtttattattacgtttttcatattttaatgttaattttgaaaccgcactggagcgtcaaaaggaaagaactgacattatattatatattgtattttatatattatatatgtagtctattttgagcgatttggagggtgtgtgtccttttgttatatattttaccgcgattcttggtttaaacatcctgtatatcaagatatattcagttaattctattattattaattgtattatttaaagaatgtacatacatacacatacattattatataatatgcattttgtccactttatgtcaaattccatagacaaaattgttttgctatgaagtggtgaacacagtttcacaaaaaaaatgagaatatcatatcatttttggaaaatctatcaaaagccaaacattttgtatggaaaaaacgttcacaggtctctatggaagtaatttgttcatctttgattatctatgcattgtaatatgctattatttgtttgaaaagtggactttgttaattttagatgcattcctaatgatttaaactatgaataattatcaaaattctcacgttttttggctcatactgtcctcagttttcgtatactatttggggatttcaaaatatactgttttaaatttgtctttctagcaaaactagttaaaaggacgttcagtatatttttaatcattgatttatccttgaatggcattacggaaactgggcgactgtaaaatattgttgtgtaatcaagtttcactttaacgtgccttagtaatgttgctataaatataataaagtttgttaaaattatgtgtcacgcaaagatgttgtaatacgtactatatggagtgtcagtgcagaagtaacgtctcgacaaataaccattgacaaaagaataaagaggacttggcataaaaatcggtacttaaaaatatatcgtcgtctctttttaacttattggtgttatcgtacgtaaaaaaggacaacagtagttttgtctttgcctaaaattacaacattgcgatcggtcgccatgttgattgaccaagattgacatccaaacacaaggtacttcagctgtcaaacaatttgtttgtttacatttttcaagaaaaaagccgccattttaattgacaccaaagtttaggtaagcgcatttttttcgttgatatggcatgtcctctctttattcttttgtcaatgctccaatttcgctagtgaaagttcgttttcccttgaaaaccaactgacacataaaatattatatggatttgacagctgtcacagggctcacgcattttacaaagtatagttcatgtccgcggattgtatgaatgtgtgta

SEQ ID NO: 784 - DNA, 787 bp, Plutella xylostella
ccccccccctgaccctccacgacgctcttccgatctgtgttgttagtgttccattaaaatgcattatgggattatcatattttcttttgacaaacagagtcgagtaaaattctatgagtatacttttctttatttgcttatgcggcattagacgttcattaaatactaagtagtaccaacctacattatttttgtcgttgtatgttgtatttacccaactacctaactgtaggctcgagtatattgctgggcacgagtaagtatatttcatttaaccttcgtcgttgaaggctttgtctcagtcagctaacaacaatttacccagtttctttgaataggcggtggatgctgcaacgtcggtagaccattgccgactaattgaaggtttaatgactttgaacgcaggcgcagctttaactaatgattgtttaccttttactttttatgtacgatgctaacactgattcaaaagacgaccaaggtccaaaggtgccagatatttgtttaaacacaactgaaaagtaataagtgcctagatgagttggaaaaaactaattaaatatttttttgataatttaatactctgtaatatagaagtagaaaaaaatctacgccgaatcatattttttccagagccacccaccgacatgaagcagccaatactcgtactactaacgaccacatgcctcgccgcggcgctccccgccccgcccccgccgcaccccgccgtggtgacgtcagacgtggagagccaggcgctgccggtccacctgaggaagacggcctt

SEQ ID NO: 785 - DNA, 1400 bp, Plutella xylostella
agtttatgggcttttttgtgagtctgtcataagaatggtatggggactaattggttgtgaatttatgatgggcgaaaaggaagttgaatgccagagtgtatgtgttcagagcgtgtgaagtctgtaaaatcaatggcaatttgactcgccaggcccaagttctagcaaagttagcctggaagagatcacatttagcgattcatttgtgttttgatttatgaataactaagtaatattgaattcatgttataaaataagtcttgtgtggcccagccttgcaatatttgctcacaaggtgtcgctttatgtaccaactttaccaaaaactcgtaagttttttatctattcgtaactgctggctaaagaactatctccattgtgccccggacaggttctgggtcggggtcccgctgggacagctcgggcagctcgccgccagacgacaatggaaacccgcacgccggtacaacgccatctagcggctaatgcatgcactttgtttaattgatgcgttctcgttttatgttgcatggggtttcttggttgatggtgaaattctatacatcgcggcttattatcaggcgttttcgagggctgtgtagtgagtcaatagtaaatcacgatgatggtgttctagtgcatgtttgtctttgatctttttcatcgcaactttctttcgtaggtaggtacctactttaaatttttgttataaagttatttccctaaactacctgcgcatgctgtcattctgatatgtgaatatttgccatgtcatattgcatttggatcattttaattatattctgtttgatacaatatttttaatcattctcatcgtaactttgatctcttggtgcaacggctttgagttgggtttgattggttggttttgttcttttacgtaattagatagtttgaaggtttatctactctactagtcttgagttacttcaacgtttatttacttactaacatttttcactcctatgtcatatgcgtttccgatccaagctttacttttcttttttagaggaggattttatcgcaactttaaactcgtaataaaatactgacctaatgtactttcctttgttctacctgtaatgatggtaatataatatggtccccagacgtgcgcctggagccggcagacgacgagaacgataacacggcggccggcgacgacacgacgcgacacgatacggcgcgacacgacaaccagcccgcactcaccaccgacgttactgagacggagtcctggtcatccctgcggcggctgcgggcgcgcttcgcggccatcaagtgagccttcagcgggccggagcagccgggccccgcgccccccgcgcgccccgccgcccgctgcacccccccgtgacgtcaccactgtataccccaac

SEQ ID NO: 786 - DNA, 709 bp, Plutella xylostella
ccccccccccccccccccccccccccccccccccccacaccccccctcttcccctccacgacgctcttccgatcttactggaaattaaactaacaagtgacaaataaaatgtatttgacagctgtcatagggccgaagatgaaatttattggtattcagaagttccacaatccacaattttaacacagtctacctatcgttcgctttcgcccgttactaggctcccgcaactctccaataaatagagtgaacgaaaaactagccaactgtgaacactccgctgcaactcagccgctgggaacagtttgcctgctgaggaggcaccctaaaaaactaaaaccgaaggacaaggatatgagtaaaacataacgattaatctcattattctgccagtaagaggtgactctaccgtgccctactctgcgcgccccggctcgtatttcatatgaggataccacgctatttatttattcaatatttcacgaacgataaaattgttgaggaatattaaataagatgaggaaataagttgttctcttcagggagttcacagtaaatgattcatcgggagaaggcattcatgttttatacctccttggtgggggttaataaattgaaaataatgtatcaagcgaattaaaaagtttctcgagcttattttttttcaagtttttctttgcttgggatttatcacttgcagcttcgggaa

SEQ ID NO: 787 - DNA, 2523 bp, Plutella xylostella
ggggtgacgacttgcgaaaggtggctggttatgataagatgcggaaagcttatgatcgcatccagtggcgtgctttgggagaggcctacgtccagcagtggactgctataggctgatgatgatgatgaggtatgtagcaggatataaggtgcgagcgggtccgagcccgagcggcagatgcggcgggcgcggctccaggcgaggatgcaggcacaggctgaagaaagggtcagttggtatttattgttgcaggatatagggttgctggttatggagcattgtttacgaggtcgaggatctctattgtagctggatatacctaaggtggtctattatgaaacaagaagaagaaatactctgtctgatagatttattatttattttgtaggcaagtatgtattgcaggcacctatgaatttattttaaagcatataaaaataaagcatataatataaaatgataattgaacttccagaatgccgacgaagaaagtgaacaaaccgtgcaagacagtgaagacgcggacgaggagcccgagcctcaagacaaccggcagcgcagcgctatggactacgagaatgaggagagaccgcggccgcgccagcacacgcccgcccgcaaccggtacaaacactaccgccaaagagaatacgacgccagaaacaaccgcatgccacaacagaaccttgacgatgaagccgcttttgaaaacagcggtagcgtacacaatcaaaaacagaaatacagcaatgccgaatattctgatgccaacgatgatagcgactacgaaaattaccgtaactacaatactatgaataccaaaaacaagaaaggtaaaatggaaagtagcttctacggaaacatcacggccaaccgacaaaggcgacatgctgatgttcaaaatgccacctcagcgcccgtcgagaagccagcaggtgaagtggcgaaaaaggaggaagaagccgcaattaagcgacacatagataaacttaccactgatgaactggaacaattgttaagcacactttctgaagataaaaggaccttgctcgcgaagattattatggataacgataagaatgtcaatgcagctaaactgattgataatagtgatctgagaaaaagagaaataactaaaaaggccggtgcgatgaatgagaataacttaattgacagtaatcagctggatgaaaaagcccagggtggtgcagatatcagctctgatgtaactaatttgctaagtggtaatggaaccattaataatatggtagttgaagctgagaacataactgattctacccaatctgctttagtagctgataagactgaagttaacaaagaagttaatctggtggcgaatgctgccgaacctgctgcggaccctactcccaaaagttcagatcctgaacaacagagtccagctaagactgccaacaaacgagaggccaggtatgatcattttagagcagacgattctgccctcatggatcaaaacttattggatgaacaagaaaacttctgcaatcgggacgatcaactaacagattatgcaaacgaagaatcagatatgtacgaaaacaataatattcgtaaacgacacataatttacgagcaagagaactctgatatcaatgattctatgaattcattagaggattcctttggtaattcaaacacctacgacgaaattgattccgggtcggacatggaaccacatgtgagggtaaaaaggaaaaacccagatttggttgtaaagaagagagctgctgccctccttccggaatcgaaagtggcgtatgtgcccttcaggaccgaaaatgaagacgaagacaccgctgaagctaacgagttcgaagatgacggtttgtatgttcgaccatccaacttagaaggggacctgaacaacaaagaagtgccacagtctaaagtgcgcagcaataagaaaagatttaattttagagcatcggacagtattagacaagcgagtgatgttggtatagggtcagactccgacagtgtgttatcaggctcggaaggagtcgatgacaatttgatgttcaataacgccgcacgtaacaagcgctctgctaatgtcggcgcacagtacacgaacgaaaatgaagatgctgataagttaaatgaccgtgctgaaatggctgcagaatcacaaaaactgtctgaccataacatgaatcttgcttaccaagaaaacgatgcgtttggccctctgcctagaaactatgaaggtgaattgaaccggtataaaaggatacgtcgtgtgaaacatctccccgcttcccatgataatgaataactttagttcatagtgtccaagagcttctaatgtatgatactaaggtatagtccatttcaacttaaatagtaggtacttatcgttaatttagtttatagttaatttaccatgttttatattagttgtttataagattcaatgttatggatttgctgtttgtatgtatctaattataataaatatttctattgactcataaaaaaaaaaaa

SEQ ID NO: 788 - DNA, 773 bp, Plutella xylostella
gcggtgggtcaatgtcgggccgcacccagcccgcacctttcaggtatatcagtcgaggctcctgtacgactttcagcagcttttattctctggggaataagagctattttggaagttaaaagtggggttctagatttcggttgtacggctgtgtgtgtactactttagattgcgccacgcactatctgtggagtgttcatagtattgttatacctatgattaggtaataagtgggtaagtagactaatttgctttgattaggttataaatcgtagatgatgattgagatctatggaaataaataattttgtcttgctgaaactcgatcacaattaataatacttacccaaattataaccaaataccattctttaagtcttcttcgttaaatgaattttcgcagaacgttaatttaaatgagccataatcattataaatggcctactaagcataatcaccgttagtaaatacttttcaacaggtggctaacaagataaaaggaaaacaaagattttctttgaggctaaaatgggtgtggctgcaaataattatgcctccatgtgtgatgtaagttcatgcatttttttagaaatgtgacccaaagtattataaaaaacattgcatgttatgctaagtaatataatagcaaattattatttaaagtgcttagctacagggccgtaattacgagagtattaaatatgaaattacaacctaataatatacctggtaatactttgttaatatttgttaatctagaaataaaataacac

SEQ ID NO: 789 - DNA, 1033 bp, Plutella xylostella
tgatacggcgaccaccgagatctacacatagaggcacactctttccctacacgacgctcttccgatctggacagtaaatcaagactagcgcttccgttattcatattctgctaaaaaaaaccttttcaacgacgtatcactcatttctattggtgctggacagtccagcactgctggtcccagcttccatatatttgtgcccatcatcatttgtatgtaaaggaaaaaacacctcaaagctcaggttagttacctagataaataggtatgtatttgtatattgtaggtaaacaatattatatggacctacatcgattcatatgggtaactcattgtttacaggaagactaacattagtcatctccaatattgtaataatattaaatttgtcttcctcagtttcgtgatgtgtatgtataaatttataaagcgcatttaaaatcggtaggcacatattaaataagaccagtgttgtgttacatcttacatctacttctctctaccgaccacttactactttgctaaacatcaatctttacttaatctagacgaatttattatttacttacttatttgtttataattttagctttttctgccaggaaattggtgttatagggttaagctactttatcattcttgctccgttatcctaccaaatctgacgattcttcaatctcaaaattgtttgctattctttcgttatacgtctataaaaattaaacgatttcactgattaccgattattcagtgcaattttacatacagttttcagaatataatatgagtataatactatatactttgtagtcaatttgtgctttttcttttgtgaaaattaattattaccctgggtttattaattttcttaaaacagtttcaaaactattcaaaacatggtgtatacttaaatgaagttccaagtctatatacgttacaagttacaatgctcattaagtaacacatgaaatgaagccaggtaggtgtattgcataactataatcgtatgtgaatttgattagaataatcggtt

SEQ ID NO: 790 - DNA, 1335 bp, Plutella xylostella
caatcacagcatcacacgaccgcgcgttcaaagcgtgacgtaacgtgtaaacaaactttaggtcaaatagttgagttaaaattgttttaaaataaaagactgtcacaaccgtgcggattttaagaactacataagaggtctctcatcaaatcataatgttataaatagacggatgacctatcactcggtaatgtgtttggcgtccgaagagaaaaagcgacggcatctttaaaaaaattggacctcagttttgtatcttaataatacaaattgtaaataatacaatgtttcccgagtgtcctgattatgtgaagcttctgccactagaccaaagaggcatgcatgtcatatttatgtatgtttcaatatggaacaggccgtgtgacttattataactaagtagattgtagtgcagatagcctaccgcgtcacgtaagggttatttatattagtgttgttagtgttccattaaaatgcattatgggattatcatattttcttttgacaaacagagtcgagtaaaattctatgagtatacttttctttatttgcttatgcggcattagacgttcattaaatactaagtagtaccaacctacattatttttgtcgttgtatgttgtatttacccaactacctaactgtaggctcgagtatattgctgggcacgagtaggtatattttattaaaccttcgtcgttgaaggctttgtctcagtcagctaacaacaatttacccagtttctttgaataggcggtggatgctgcaacgtcggtagaccattgccgactaattgaaggtttaatgactttgaacgcaggcgcagctttaactaatgattgtttaccttttactttttatgtacgatgttaaaatacgaccaaggtccagagcggcagatatttgtttaaacacaataagaagcttaaattttaagctccactgacgagtgatacctagatgtattgaaaaatacttatagttgcaaatttgcaatgaataaatgaatatgaatgtcaggatccaacagcagtttgctctgcggtgtgatatatacatgtattattattacctacgcattttattttctttaggaaatgaacgagcagggaaagcaaggaccttgtatataaaccaactttctaaccaaaaccactgacggcaaatcatatcatttccagagccagccaccgacatgaagcagccaatactcgtactactaacgaccacatgcctcgccgcggcgctccccgccccgcccccgccgcaccccgccgtggtgacgtcagacgtggagagccaggcgctgccggtccacctgaggaagacggcctt

SEQ ID NO: 791 - DNA, 5600 bp, Plutella xylostella
cccccccccccccccccccccccccccccccccccccccccccaccccccccccccccccccccccccccccttccccaacacgacgctcttccgatctaatgcggactgacccgaaaaaaactaatctaaaatagtttcagctacacagacacggttaacttataacacccatctttttcgtcgggggttataacacctttgggacatcagacgtaaacgcaatgtttgggtagtcctcaggctagaccaagagctaagctgagttaagcgaagctaccgcttgattagctcgcgttggttgactccgttttctttactcgtgtgccactgactactataatgcaagatgtagatatatatcttgcattataatgttcagtgtcatatgcaaactatgctacgagtatggaaaactaggtcttggtctgccttccacaagaagtgtggggggtgataagcaaggggagcccaaaaaggggtgggatgtcagggatgcataacatcgcacctgggcgcgtgccttaggagcgatctatgtctattagtggactattacaggctattgctttatattttctggatgacatattattatttttttgctaccgtaaaaaaatacgtttcggcaataatgttttttttaaatcatttctttcgccatttcttctcctcagtgactgagcctttgtgaaagactcatactattgacaatccataaattattgtataatttcacgttgtaatgatattctgttatattctaacaaaataaatgcataagtattgtaattatgtgtcggtatttttgtttcaaatgttgcaaggtgcgtaattttagggtctcttaaattagatgcaacttattcgtaaacgtagggttaactcacattttaaaatattcacactttcgataattcaaaaatagttaccatgtgaaaaagctggatcggtatttacgactaaaactacttcatatattttatttctcataaactttgatattacttaattaaattttataaaaggtaaagatacggcctaataatcttacattgttaaggagtatgtatggtgtgaaaatggaaccaaaatttaaaaaaatacttcaaaattcattaaacgaataataactttaaataatattgaagaaaactaagttctgaccttattaaaggacagacgatttcagtcccaaaaaacgggagttgcaattaaaccgaatttcccaatttctattcttaaaatagtaagttagtaatttataagtatctatcccgaaaaaatggaaaagtcccaaatgaaaaatggaaattttcccaaaagtctaaaattgcttgacgggagttttgtttatgaaaattctttcggtacataattcactccatttattttagtagattctatacctacttagcttttctactgcaattttgtaaaaaaagaacagtttgagatagggtctcgaactgaaaaaaacaagcattgaatgagggttggcaaagaaaatatttttataatatattttgcataagaaggcggggctaaatatatatatatatatgtgtggtttggtaagaaagcgtgtgattttcacctgtaatgtaatcgtgtaaagtgataagatctcggtatgaaataaggcttgtgtggtctagtctattaaatcgttaaatatttttttttatcgtttttaaaatctacgacgtctacagacaaaaataatagttttgtttcttaaaaaactagtaattatccgaaatttgaaattcggtttcagaaaataaattataatctcttttgatgagaaacagagaaaaaaagtttggtacttatatcatacatgatataggttttttgaatcgactcacacgaaatgctatggatggaattataaaaaaacctcctaaactatacttgcgaattgctagtctttacgataccaaattaattatttttttaattcatgcaatatcccgaactgagatgtaacagtttcaaaatgtataataattatagtagtcatacaagtcctcagtgatttaagtcaattttccacccttgtgtattttttttactagagactcgcatatcagtataaattcatgttttgtggcgagctctatagctttcgcaggtcacacatctactggttgagttaccttcataagtacacttttgttccttgtcaaactcacagacagtcatcgtaaattattgactgataaaagttcgttagtttgaaaatttcgtaggcaattcgttagtttgataagattcaaaagtgtgattttaaagggaattgattattaattttgaaacatagagcgttggttgacttggatgagttggttgtctacagaacaaagggcttttctgtagccaaaacatccaagacattcagtgaaagaagattgtgggaacctgcgcaagcgccagtatttaaccattatcctccttagaccattatacattaacctgagacccagtttacgatttgactaaatctatgtaccttataggacgtaagaatgaatgctgtcattggttgcaatgacagccaatgagaatcaagaattaatgatttaaccgaatttttgaatattatgcatttttttgttaaaactacttcatacattttcgagaatctttatagactttactagtctgatgtaaataaacttttagatgaactttagaataatcttagctacatatacacaggtttggtattgtttgtaaaaatgtcaggaagttattatttaattcagccacatatttaattattggagccgaaataatttgtaaagcaattaaaatttaaactttttaaatggaattaaaactaagttgacgaaattaatattctgacatattaaacttttcatattatttcgtctctaatgatttcagatctgtattcacaatcatcgctagcagccgcagatgttgctagcttatccctttataagccagaaatcacctgaatcgcatgaagttcaaaataaggtggcaaaatgtatcaacttggaattggctggttgataagcatgatccagaggtctagggttccaaaaacaaacatctgtgactgctacactagctacgaccgatccaactaaaaatatactgttgcatttgcatctgtcagcactttaacgttatgtcgagaaaattcaccgtttataacattaaaaagtagaattagaattattaagtacttatatggttaaaggtcaatgtaagtttctcacttggtttatttttgaagttacctttaagtagttctgtaaaagcgctaaaatgttgtgcataatagctacgcagttttttatcctaaatcacagacttcggtagtttgatcgaaacaaaaacgaaacgagcgagtttttgggccacaatcttcctattgtgcgtgaaaacgtatggaaaaggaagaaccatgctcgccagctaccggtgtagcctgtgctttaacactcaggattttgatctgcgggttattttgaataatttagtttaaaattcataaaaagcattatattcataatcactatcatattcataatcatcatcacattcataatcatcgtcataatcataatcatcgtagacatattcatagtcatcactatattcataatcatcgtcatattcatgttcatcaatatttcctacttctttgccgctcggcaagccagacgtgtccagtcgacttattctcttctcgtcttcgtcagacctattcttcggccaagtgacagctgttgtcgcgaggcaatcaattgttttagcaggctcctgtggtggtgtggctgggcactgtctctttcttccgtcatcctcatcataatcattatgtcattcttaagccattataggaacaaaatcctcaaggttctcgatagatagctcaaagacttttcgctttggactgttagagttgtaaggtcacttggattcgttggtgttcctatgtcggcttattctggctttcatttattagatgaattgtcggtccacttcttctgacttataccgttcatctggtaaacggaacccataatcaacttcatctcatttgttgcggacatcattcctacatttattcacaagcattttagcgctgtgttactgttactttattgttaatattaatttaatattttttttaaactacatttgtaatcttgttttcttttttgcatgatttctagtttaacttcatttattgttagatttagcctaaattttggtctagtcgttaataacattcgatgtaccttagaaagaataaataaaattacacccaaaaaaaaaaaaaaaaaaaaatataataaaaaaaaaaaaaaaaaaacttataagtaagtcccttacaggaagctgtaggcacactaacatgacccttcctcatccaaatacctctaggttttgaatacctggcaccctagatgtttaaaatatttcttaatatgaaattaaataagatttctcactatatattattttgtgagaagataatggtttgtaattactagaaactaaccacattagcccatataataagacctaataaaataacattgtttgagtcctcaaccaaatgcctttttaaatttattaataggtattcgtgtaaccttatttattcataaactaaatgacaatgggcgttttgggacctatgtccaataaagatgagacatacatcgttggatagctcttttcaagtgagcaaaaaagtattatggcgacaaatccgtataagttgtccattttgaaatatattcgtcggaaggaagtatttttctatggcattgcactctctcttctgatgacagttagggcgtaatacacgtaaacacgtattattaaaatgggagaaattactttcaactggttttatttactgagataataaacaaatataatattatatgaaatatgatcattttgttataaaaattaaaaatgaatgtgaaaaactaacaaaaacattaaaattacagaaataaaatataaaaactttcaaggtacgattattctaattggacagtaaatcaggactagcgcttccgttattcatattctgcaaaaaaataccttttcaacgacgtatcactcatttctattggtgctggtcccagcttccatatattggtgcccatcatcatttaataaaagttatagaaatgtgaacgcatttaatgatttcctgaatatgatttaatgcgtaggtaatattcaggcatattcataagtaggcaggcattttcaaatataccttaaatgctatttagttcttcatgaatatataggtaagtacttgttataaattattatgaagcagttgaaacatctcaagacaggatctgaaacatacaataaacctttgtattgtaattatcagagagtgcgcaattgatttaaaaaaactactactttatgataagttgataacactacaagtttctagtatgattgtgatttataatttgtcactgtcagattaaaatatttataacgactgagttctcttgattatcatttgtttataatcatgaaggttaattagcggtaaattaaaataaataaccatta

SEQ ID NO: 792 - DNA, 1254 bp, Plutella xylostella
gtttatgtgtattacttagtattattgtattattggacataggtcccaaaacgcccattgtcatttgccttacattttgacagtgacagttgacgatacgcaacgtaaacagaggtttcgaatcttataatcgctgcacagtggtagtgttattagccgagacgtttcatttgcacttacattccatcttattcgcatattattaatctaagatctctgtgaatctatgtatttcttaggctgaatccatttatgtaatgtaaattattagtcgatggttaaccttaattggcctctaagaaacggagtgatagagtctctaaaatatttgaatcggtgattataaaaaataacctttccattttaccggaggaactgagttttgcataaaagtatgcaaaactaccacacattatagattatatatagattcatacctatattaacttacccacacatttaattttatagatcgtattttaagtttagagaacgtttacaaatgacttcgaaacacgagagcttaggccctttaaaaattaaattaaaaattaaatttgtgaaacccatccaaaggagagttgttataatcatcggtccatttaagccacgtcatactatacaggctgttgtgaaagtgctagtttctacaattaagcatttcatttcttcaatttccaaaagtcgtagagcaaaaaatgcttatattgaccccctgagtcacactctttcggcttagtagttataccactttcgcaacaacctgtatttgaacatttaataaaaaaaaacgcttaaaaatttagatgacacaaaaatttatttgttaaggctgattttaccaaagcttgtttgtactttatttattgtattaaataggtaccacattgaatttattccttaaatatatatttcaaaagactgtttaaacattgtctagtgtagcaaacatactgcctggttgatcagaatatagataatataaatatagatcttaaaaccgctctcttcatagtgttaattggtatgagagttatacagggtgaggatttatcattggccttcttgacagttacacaaatattcaatttaataaataaatatgtggggacatctcacacacggccatccgaccccaagctaggcagagcctgtgttatgggtatcggacagctgataatatatctacacaactacatagatagatatatatttaatataaataatatcatcacccaagacccgagtacaaat

SEQ ID NO: 793 - DNA, 1303 bp, Plutella xylostella
gtccaagcggcggccttggcctgcatctgtgctgcctcgcggagtggtgcaggcggcggcggcggcggcggcagcccgggaggctcagtgcctcagtgcgcgcccggcgccggacctcgcaccacactcctggcattcctcgcctccactgcccggaccggtcctacatagtggttgcaggagcggcagcatggcgcaagggctggcccgcgcgctcgccgtcgtagccatcgtgctcatagcggcgccgcacttcaccgcacaaccacctactgcagaagaatcaatcggaaaggatcgcacacaaagacaagcgtctctaaaatacaagaaacaaacagcggtcaaaccaaagtggggattttttggtaccattttccacctcatactagagcaagttaacgacacaaaaagcgcatacaaccagattaccgaattagtgaacaatcagttcacggacgataatgttgtcccgacagaagcagaccccaataacaatggaactacggagactccgaagatatcccgggcagaattcctgcggatacttgatcgaaatctgaagggtttggcgcgtctgcggaacctggagtggcgagaagcaaagaaggactcctgggagaatttgcagagatacaaagaagaaatattcaacgggaaaaaaactggaaaacgaagatagcattaaattaaattcattttaactacttcacataacttatttatttgtgtaacataaatatttaatgtaaaggaacctcaaggacggtgacacagtgggtatcttacccgataagttttacatttatctacctacctatatgtacttaaaaaaatctaagtaggtttgtaatgattggctgccatcgttcataaggtaccttttctcgtaaactgttacatttaaattaaagattgttttattatcagagtgctcaggttttagaaaagtatttttttcctaagctgaataaaagtttcagaattatttatgttaagtatagaatttgtacatgactgcaggtagcttgagggtaggggtagatatatgaagtagataagtaagtttaacagataaagaccccagtacacaagggccggtgctaggctatgcaccagcaccactgtaggccacgatcacattgacgcgtgaatggctcattgctgtctgataaaacacttgcggtattagattaaaaatataaaatcaagatggtatggtacgtttacattattaacaaaacgcataaaactctccgcattttgtttaccgtcaacctaatgaaaaccattgtaccaataa

SEQ ID NO: 794 - DNA, 945 bp, Plutella xylostella
tgctcagttttgtatcttgacaatacaaattaatggtgcctggtgcctgccactcgggagtccatcctgggactctttaatatttattagcttctgccattagaccacagaggatggcaagtcataaatatgtaatttcaatgtgtaagacctgtctgtgtgatttattttaactacctataataaggttgtagtgcaaatcgcctaccgcgtcacgcaagggttctattagtgctgagttccattacttatcatttataggctcgagtatattgctgggtacgagtatattttatttaaccttcgtcgttgaaggctttgtctcagtcagctaacaacaatttacccagtttctttgaataggcggtggatgctgcaacgtcggtagaccattgccgactaattgaaggtttaatgactttgaacgcagctttaactaatgattgtttaccttttactttttatgtatgatgttaaagtacgaccaaggtccagagcggcagatatttgtttaaacacaataattttaagctccactgacgagtgaaacctagatgaatataaaaatactcgtaataatattatatacttactcttcacctcctggatcaaacagtttgccttgcgctagggtgtaaattgtgatacttattacgtattttcttgtctgtataaacataataggtatgcagggaacagggtcatcatcactttccaaattccatattttatacttaaatcagatcttagtataaccaaaaccaccgacggtaaatcatatatttttccagagccagccagcgacatgaagcagccaatactcattctgctggcatcctcatgcctcgccgcggcgctccccgccccgcccccgccgcaccccgccgtggtgacgtcagacgtggagagccaggcgctgccggtccacctgaggaagacggcctt

SEQ ID NO: 795 - DNA, 594 bp, Plutella xylostella
aggtttgttgggtatatctggttttagagtcctcaaaaggaaaaaaaaggtaggattacaacattttgacgagcatgtctgtgtaatgtaacgttcttacgaatggtacaatacaggcaaaagcatgataaaatgttcgtaaaggatgaacatcagagagcggctcgttgttctgttacaagtacctaaatgtctatcctcacctttataggatcactttgttgtctgtccgtttgcatgtctgtctgtctgtcaccaccttttttgtatttacttatttattcccaatctccgcaccgcaaagagccgaagtgaagcgcggccactctttacgatcttgagtcggttttttgtatttgctgctatcactataactatttatgaatgcaacattgaacgtaccattctactgtttattgagtgagaagatataatgagcttataataaggcacaaagcttattaaattatttatgatcgtgttttttgcttttagaggaccttttacttggtggcgaagaaagtcagtaaccaatgggaggttttcaaccatagacaacgtccatagacaaaacccgacaatagatggcgctag

SEQ ID NO: 796 - DNA, 1333 bp, Plutella xylostella
cccccccacccccccccccttcccctacacgacgctcttccgatctgcttggggttgacgaagtatataacgtcggttaacgaatagaaacatttttttaaacgtatgactactttaattaatgtagtatgtatgaggtagtctaagtcaaaataacgaatattaaattactttttatcgacgtatttagtttttaaaattcattaaacatcataaatatataatatttaatttatatactatattaaacttaagtattagctggtgaacaataatgtatgagaacaagcttaatcgggatcgctgtttaaggacaagttctattaaagttaaagctatacttcgatcagtgtaaatatattcgctatagacttaaagctattatatattaaaataggaaataaattacgttatcaacaaaaagtgagattaaacttaataatattagtacttatagccaactggactacactgctaaacgttgacaaaatatagtttaaaaaaagaatctcataaaaaaatcatcattgtttagtcagtgtaacagttgtccatagaataggttatagtacttaataataatactggaaatcgtagattctagaaacgaatattataaactgcacaactgtaactataaataaacaaaaatatatatctacgtcttcatcgtaataagcatttgcaattaaagtaaacctcaacataatattattatatattaaaattataaaactaaacgaattatatatacaatccatttatatgctttattacgttgactacattattcaacaatctactttattccctataaaataacttactaaattgcaaatgctgcatatttgagtatctacatctatattttctgccaccacagttacttaaactacacataatatttacatataactagtgtggaaagttatatatccataatacctattgcaataaactaaatttcatatcgaaaattcaattaatgttagtgatttccattgcaaccaagtttgtctattaagccccagcggcgtaaaattttattaattttcattccaatatgtgtttcgaaaccatatcagtgctatttagatattaacatgatttcatatttattcccagatttttacaaacttaaaggttatctacttatttgtgaaaaaccgtggccgtttctttttgcttataactgatgcttaaaatgtacatacctacttaccatagctggattctagccagtcggataataaattatatattataaacatggctaatatacagataataagcgagctttatgacctacttagccaacaaaagattttgaatt

SEQ ID NO: 797 - DNA, 814 bp, Plutella xylostella
tttttttttttttttgtattgttcttgttcttaagcttgtcttgacagaaaagcaaaaggaaactttttgggaaacagatgaaaaattcacaatcacaaaatcttaaataaactctcaagttattaatagcttaccctttttatatttattaaatttatacaagttatcaaatgtaaaataagatgcgggtacccagaactttcaaggctaaggccagggtaaaaccgaaagcaaagaaaacccgaaagaacattacaagaagaaaaagatgtgtaactggaaatcatgtttcaattcgcgatctagatagcattaacaaagccattcacggaaataaatctaaccaaggtgacgaacgtacgtggaaactaattccaaaagattctaaagaagtatacaagttaaggcgcaagcgcgctcagcaagagaaagcacccagagaggaagataacatagatgaagagccaactgaagactcaagaaaaaacgatccagctcagcaacaaccaaatatgaaaaataaacttaaattcacaaaaaagaaacctagtacatctgcgggtgatggactgaaaaagaaacaagttcctaaagaaagggctccatctaggtgctactctgagtgctgctcatcattgtcttcaatgctcaccgtatcatgccatccttgcgacagcggcactacagcgtcgacccactgcagtcactacacagatatggaatattaatttataatggatgtaaaaaaatgtatttagaagaaatgtgcttgttcttttcggatcaataaacgttcgttaaacctgaaaaaaa

SEQ ID NO: 798 - DNA, 676 bp, Plutella xylostella
aagtaaataaataaagtgcttaccttgtaaggtaatattttaaagatggtgcattaataataaataaatagtcatttatttcagactagacacccatattacaataaaatgataaaataaaaattcttaaacctaaaattaagatatcggtattgttcacaatgataaaaacttttgttatcattatggttatcatgattatttttgttattcagtatctaaaatatattagaatggatataaatgagttatctctagtcaaataacttaaattaacggctgaaattaaagctggaatcataagattcataagctaataaggcttgaattatatgcgccgatagaataaaaaatcacaaggacctactccttgtgactgtaatgtctaaagatttatataagtaccataaaaaaaatgttaagctatcgggccggtaaacatgatacagtaaaatgtataatattatgtaatttatctacttttaaaaacatgctatgttatttatactgctgttgaaatgactgcttaatattttacactgtacaacgtatatttttatgtatcgagagactaaggggaactgaatgtttatattttgtatatgatattaaaaaatgttattgtgaataaatattgttgcaaatttaaaaaaaaaaaaaaaaaaaaaaaaaaaaa

SEQ ID NO: 799 - DNA, 2229 bp, Plutella xylostella
ccccccccccccccccccccccccccccccccccccccccccctttccccacacgacgctcttccgatctttttttttttcaatttaaatgtagatagacaaatgtctttcggtataagtaaatttgtactttttttttcaaattataatttgtttttggtctattaaaatcctgtaggtccgtccaaaaatgttgttatttttatgtattagtcattttgttcttgcatttacaatgtttcctattttgttgtattaaaatttaaaatattccaccattgtatgattttgttgatgttatcctaattataccttagaaaataaagattttttaaagttatttagttagttgtaatttttaaagttatttttacaatttacaatcgtaattttataacaacgaaaataataggcagtcatataaatcataatgatgtttattcagctgtaaaaaagcgctttcgattttttattgtagtgtttaatatattaacgaagtcaaaataacatttaatgtaagtaataaatatatttcttataggtagctgatacttattctttatgtagatatctataggtgtaatttgtatggttatggtgttcaagtttattctatgtgtattttttcttacttggcaccgattttgagcagtcttggagtgtctttttaagtgcattaatttacaaacgaagttataaaataaaacaaatgacaatcggcgtactaaaccgatacgcccctatttcagttggtcgcgaacagtttgcctactgggatcgtagccttagcaattgtaccaatgtggctaacaaatcaatgtaagtaattatgttattccgagtcatgtcttacacgacaatacatggaatagctattatacgttgtatcagattttttgatagggcggctttttttcgtgtgcaatataccttataagtacgaatactctgttatcatcctgttagatataaaaagctataatttatgaagtgtgaagcaattatttcgattacataatgaaataaaaaagcagtcatcgccattttgaaaaggctcgggactcgggtttttcgaactcatatggacgaacgacgaagtgtcaacgtcataataaaatgttacacctatcacgtcgttcgttcgttcgtcaaaatgacttcgtgatagaccctcaggagaaagattaaattttacataaacttatgtaaaaaaaaacagacaattatagtattttctgtcggttgtgttaactgctggtgatccatattttaaataaatattttttttttccaaaattggctattggttatgagtataactttttataaataacaggcaatagtttataagaacaacgtcacagatctctgtatggacaattttacatgtaactttagtagaagtagtcaacatgaaatatgtatttacttagattacgacttagatatctttaaaattttaatgtttcctcagtcattagcatttttacctaaggacctcagaaacattactaggtctcggacctaccaattagggtgacttgcaccaaacatttaaacgaatatttaaatctattggtctgctgttaaagcgacaaatagttttggtgcaagtcaaccttagtgtcgttaaactaaactaaaacactagtcgaataatttagaatattattgatggatatttgagctacgaattatagcaataagctattgaaaatggccataggcttgtgttagtagattgtattgtgttgagtgtgccgggtgtaagattatcacaatttacgtacaaaaagttttcttactttttcataccatgcagcgcctctagcggtaagaaatggaaacataaacttggttattacgtaaaatattaaaacttacactcagcatgtttaaccagagttgggtattgtcggtacgtgttatgttatgtttaaatatgttttgcataatgtatgtttttattgttcttctttctgagtgacatagtgattaaattgacaaaatttggtagatgcctatcagaaattttattatattcatatattttatttactcattgtattgatggatgcatattttattaattattatattgtttagtttatagttatcaaatttggatgaaataatttatgttttccacttggtcgataataccacaacaataacttataaaaatgatgtaataaaagttttacatttttaaaaaaaaaaaaaaaaaaa

SEQ ID NO: 800 - DNA, 1016 bp, Plutella xylostella
gcgcacgcgtctccaagtacatcgactggatccagaacagcagcttgtaatttaatgaataaataagaatacggtttaatgcatttctgaatatttattgaagaaggagtgcggaagagtcagtgacgatggatcactcctatcgtaaaattcgtaaaccttacgtaaatgaaggatacctatagcttaaaaaaatgtttataattttatgagtcagtaggtattggcatggctcctggatgtgccaatcgaattctacgatatttatcaatcatcattaatcttacattaagctatttatcgatgtcacttaggtactcgtatagtgatgaaatacttaaagtcttttatttctacttctatgtcctaatcagacaaaaaaacaattatctgactgtaaataattatgataaaaatgtactttgtctcttgctaagtaaaagagattatgttataggtatgtgcttttaccgtttatttttgaaattgtaaacaactcattcctcaggagaaggttaggtgagctatgatggttaggtgttgagagatagattagatatattcagtgcgccgcctcacatctcagccgaagagtaatcccggaacaaccccatgcgatcagccctgggagcagcttaacagaacagctagtgaggcacaaagttggctataggggtggttggggaagactggggtgagacccctaaaaacatcaatcatcatcatctttgaagataaagtcaaatgtttttatttatcttacttatatacttttatgtagttactctccgtttaaaaaattgggcttttgtcattggagaagttttgagattggcgattagactgatcggacctcacgtgtggtgtgcctgagataatttagtaatctataataggtacctaagtacatattttatttgtctgtttgtataagtaactcacctacttactgaataaccaatatcttgagcttatttatatacgaatatatatatgtatatataatgagaaaaaaa

SEQ ID NO: 801 - DNA, 1021 bp, Plutella xylostella
tagcttccaaaaatagtaatttaatttcgtttacgcactgattgtcaggtcataggagatcattcataatatactcgtatgttgcatatccggtgacgttactgtaacgattacagtagcacttgagtagcaccaaggctcttctgcgcaacaccgcaaatgcacttgatcactatcatctgtgatgaaactgcctttctatggtccatttatttacactcatgctgtaaataagctatactttcgtaaattctaaaaaaagtatctgaaatagacccataaagcttagatatacttaataataattaagtattgcctaattgtgccgaagcaactaaaaacgattcaaataaatatataaataactggtacatattaccaattaattgcacgcccctagactattactagacctatcccattagtttcttattagtaacggcactaaacattacacaccagtcatgtcgaaacagattagaaatagcatattataaatctcttatttacattgattagatatgtaaatcttatgtatagacaacgtaatattagcaatggtcaagttcaaactaatacaatttggaagagtgtatacttactagaacatgagaatactgaatttgaaagtaccacgattgtatcgaaaaaatatatctatgataccatctttctattctattcaataataataatataatatgtggggacatctcacacacggccatccgaccccaagctaggcagagcctgtgttatgggtgtcggacagctgatatacctacacaaatacatagatagatatatattaaatataaataacaatacacattaggaaggaaactaactaacctcgataaataactactcttagtttgaaccagggaccaacgacacagccaccattaaccactgcaccatagcgtcgtcgtcgtcaaagatttatagagttacgctattaatgtaacaataacaacacaaagaataatcgtttgcgaacttcccatgcccaataaaatga

SEQ ID NO: 802 - DNA, 836 bp, Plutella xylostella
tttttttttttttttttttatcgcgtgatgtgttttggttttgtataagtttattttttatccacacacaactaactgttgtttacgatggtatattgaggtcgcggcgaaaatggaggttgctaaagcaagcgaggcgcccaagatgcttcccatggtgatgtgcggagaccactcctccttcaccaagtccgaggtggcgagcaaggagtctcgtctggacgccgacaagtcgcgggagaagttcaacacctcatactcgaggctgtctcccacgccatcgcacacccgcgcggaccaatcagcgaagggtctacgagcgtcgtcatcagagcacgcgctgcgattggccgaagcaagacgacggggtacctcgcttgatgcaatgcaaacaggggacgcactcaatgcaccgggcaaccgcgcgctaattcaagcggccctcggcagtttccactggcccccctacctgctcgcggtgtgggtgttggtcctattgctgacccacctcctccactgcgtcgtcaatatgctggagaagtcgttgcctaagatcagaaacgcgtgtcaatacctgcgcacccacgtagaagagtcctggacctctcccgaacagcagaacaaactgtaccccattgtactcgggctcgccacgtgtctcctgtactcagtgtactcactactgtactcagtcctcgcagtgtgtgcttgggccgtgcggccgctgtgtgcggaggaagatgtgcagagtgtggaggggcaggatgaggagaaacgacggtagttgtgtgtgtgggtttttttggtgaatatatttttgtgagatgggaaaaaaa

SEQ ID NO: 803 - DNA, 545 bp, Plutella xylostella
tagacatgggtaggtggtttgaattataaaagaaaactgcattttgaatttttgagctagacaagcttgttcatggttttgcgctgacaagccttcctcatttaaatggtggacctattgttgtggtttggacaaatgtatgaatgtgtacatttgactttgtgtgggcaatatagggttttgatttaagtgggtgtgtatacttggctattttatacatgtgatttgtttcgtatattttggaataatgaacgcattttgtgaacaatgaacggtttttttttcagttgcttttaaaaggatttttaaaagtggagtaagtatattgatgcttttaaaaatgaattatggacggtttgaaattagatttaaaatatagctcatttaggcagtttaaccgtcactctttaaattgcattaattacaaataagtcaaacaatgatgtcgattctgaaggcagaaattctaattttaacgctgtcaaactaaacaatttgctatactctaatttttaattccgcggaattctgacatttcattagtg

SEQ ID NO: 804 - DNA, 1507 bp, Plutella xylostella
ttttgcgaggcctcctcgaaatttactcttgtcaaaatcacaaaactttataaccattaatcacttactcaataattttatattcataaaaaccttgattttatattaggtacctaatcacgtatctattgataatggctcgagtagcgaggattgccttagaccttgctctgttttctatgagaacagtaactccggccgtcagatcggtttggggtacagccaagggtgctattgttggttctaaagctgaaagaattgttgtaaatccgttggtaaaaactattgaagataaactggatcagttggttgtggtagttgaaaacaaaacagagatgttaaggaataagcagtacccaaaagaacttgagtatctagaaaaggaaatacaaaatgttaaaaaacgaatgaatgacagtcagaatcctggattggattccaaagaaaaaactgataatgtcccaaaatagactaattatttaatgctgttaggctattataagttcttgtctgccgttatggaaatcattgttaaacaattggtcaaaactagattgtagtagtaggtataccgattatacctaactacactaataacaatttaattaaatactttatcaatctatctatctaactacctactactttaacattttagctgcatcaaaatccattaagccagctgtagggacagcatggacctacgctaaaatggaaatggcaccacctatgacagttaatttcttacatggacctacattcaaaaaggtagaaaatgccgtttcatcagctgctgatggtttcatgggagccctagacggtggtatcaaaaaaattgatgcatttgaagcaaaacgtgcgttagagcgtgaagctgcacgtaaggctgcactagaaaaacaaaaagcagatgcggaagcaaagaaaaaagaagaagaggaattaaaaagattggagcaagaggaaattgataagtacaagtgtacccctgaaaaaggtgctgactcagaaacggttaaaaaagaaggtaaagttattgatacaaagcaagatgttaaagttgaatcaaaagatattaaagacgaaaagaagctgaacgaaaaaaccggtagaacaaagaaagctaaaagtgtgcctaagaatgaaaaaaaagctgatggggtggacaaaggtactacaaaagtggttaaatcggatactaaaactcagacaaaaacagctgcgaagggtggaaaaccaacaattgcaagtgcaagtgcagaaaaaaagaaggaaccagctagacgcaaggaacctaagacttctagacgagaaactaaaaagggatctgcacctaaacctaataaatgaaattaactaacatattttaataaataaatatgaaagtaggcttgaaaataaatattttgtataagtaggtagttgttgtggtatttgatccgtatttacccaaggacttgttattaaaaatttgggtggagagcaaaaaaatatggttccttgggat

SEQ ID NO: 805 - DNA, 750 bp, Plutella xylostella
aggcccgccccctattacattgggactaacataacactctggcgaaaagtgggtgcagcaatgcacctctgcctaccccgcaagggagtacattagtacaaggcgtgagtgcgtgtgtgtgtatttagctttaatttaattatgttttatttagctataatttcactttaatttttagtaatatatgtaactaaacttatgttatctcgtatgtattatgatagacgactcaaacatgacaagccgggctaatgaacaaattgtagtaattttttatatatttccgaaaacatattttattgggattacagccaatgtaactgttgcgtatgtattactcctgtaaataaagaaactttacgaaaagggagaaggaagcagtaaggtattatacagagtgttgcaaatagggtatactaagccgaaacctagccggattagtataccctttttacaacagcctgtatattatatacagacctattacaattgcagcttgagttcattgtccattttcttattgtttctttctttgcgttccttataattatgagttttgagtgtaatagttttaatgttaagtgttaagttgcacttctgctggagttggtttgaaagaagttgagtaatttttcaccattgtttgacaaggaaattatggctaggtattgactatttctgtacgtttataaattaagcaaaataaacataaataatgttgcaaaaaaaaaaaaaaaaaaaaaaaaaaaa

SEQ ID NO: 806 - DNA, 1433 bp, Plutella xylostella
ttgcttgtatgaagaaggtttgagtaaaatgttctgaagggcctatccttccttttgaaatcattgggtagatagcctattgtctgtagtggattatctgcctataagtggcctataagaagcttatctaattgtagtgcctacttattagtgcttattacttccatgattattgaaagtcacgctgacagttaatgtagcagaataaaaaataaacaaactaaacaaacatccacttaaaaatgtaccgctaaacaagactaaatacaccacaagtgcagcaaaactaaacaagtaatggagggtgccactgccagcatacctcggaggttctctcacccggacaacgacagctgtgtgtgctgcgggtgccgctcccggtcgtaccacgggaccgcagcccccgcccccgccgccgccgcgccctcactcccgcccgcccctggcgccagcgctgactccgctgccgccctggctgcctgcggaaactgctgctttggcttctgcaagaaatacatctttggcaccaaatgaatcagtaccgtagaacatataagtttcataatctccaatattatctccaatattatctgctccgtcgcgtccccagccaatgaatacatcatacggattacgactggtttattccaccattgtgttgagatacctatgttaaagcattgaatatcttcaaaggaaaactcgggactgggttatttttcctaagtgatgttttaagaattcatcggtattcgaaatacagatagaaaattctattgatcgctgtcttttctttatcggaatggagggatcccccagctattcaacgcagtgtatgaaggtatcttcagttgaattcctttggaaaatgagaaatgctcgtttgagtgtttgtaatgccctccgcgttggttctacttcagtgtgtattgaattgagcaaaacagtttgtaagtaatataaatatcactttacggagactttttctggaactggtaagtactctgttatatattacgagtaaaataattgccaggaagaaccgtataaaaatagaaaatatacatgtttaaaggatgaattactcgaaattggaccacggcgaggactgcgtttgctgcaagtgtgtttccggtctctttgtttcgaagaaacctgcagctaagtcaagggtcaccacagaaacaactacaggctgtgggtctatcagaagaacgggaagaaatcaggtcatcggtacagatccgattaattttaaaaataatcttgcaccacaaacgtctattacaaatgcgtcactccctcagccaaaggcatcagctttcaaaaagggaaagcgtgtaaagaagaagatcaaatttgaaaaggaaccaccaactttgaaggagattgtgcacatgcctgagcataaattaaagataaaattcaaggct

SEQ ID NO: 807 - DNA, 538 bp, Plutella xylostella
cacagtacaaccagtacaatccgtacaaccagttcaacaaacagtacaacccttaccaaagggacggtaaagcttttctatacatttgattgtagataattagacatgtgtgatatcggaaagggcccttttaaaatattgggttcattctcatttgaagctgctaagggctggactagggactggagtaaaaaaatcaatcaatcagattagttgtcaatcatagccgtcagtcgggatgtctctttccatcttttcgtgcaccctatatttaattggggctattataataaactctgactgtgtacgttatgagaatttattgcggcaggtaactattagatatttgtgaaaaagttgtgtacagatacagaaaccctggaacagagaagacggaatcaacttagaaacgtttagataaaacatatttggtgtttcagaagtaatatcgcattatcgacgatgagctttttatggtagtttacagataaccctacttaaaaatacatcctaacccccaggaaccaataccagcgcc

SEQ ID NO: 808 - DNA, 736 bp, Plutella xylostella
tagaaaaaggagcagaagtaggatcaggagtaggagcaggagtagaagcaggagtagaagcaggagtaggagcagtagaaaaaggagcagaagtaggagcaggagtaggagcaggagtaggagcaggagtaggagcaggagtaggagcaggagtaggagcaggagtaacaggcacgaagaccattaacaatgtcgggaataaggataagtgttaattatgtgaaaactagatttgtataactatagagcggtgaaatgaagacgcaaagtgagaagaaatctctactatcgattgtcatctcaacgccatctatgatttattttgtaaaagtaagtaattattttaaaaagtaggtacctacttaagtaaaaaataaaattttaacaccttaaatacctacatatatattatttttaattatttcattttattttgagattctgtgtcttatgtctttaaagttggggaaagcaaagtagaatgggattgaactctccttgcaatagtattgagtaaaatgagataataaaaggtccattatacactcacgggcaatgaaaaagttccactcacaaaattccgacaccaaacgaccccaattttttcaaaatttttttaaaaatttgaacaaaatattattaatttagttgatggtatcctgatgctcagatcggaagagcacacgtctgaactccagtcacagcgatagatctcgtatgccgtcttctgcttgaa

SEQ ID NO: 809 - DNA, 1066 bp, Plutella xylostella
gggggtatataaaagaagccttcatataaatatttttatatacagcttcaatcttgttaggacataatattatagtgcttatagtacttacttactttattattaatacttaaataaaaacaggaaaaatgaagttacttcgtacatctctcgctttggttctgattggctgtcttttacttgaagttcagggtaaacccactctgggagaaggtctaggaggaggcgttggagcagaagcaaacctaatgataggcttagcaggaggagcagcaggtagagcagtaggagcagtagaaggagcagcaaaaacaggagcagcagcaggaacaggagcagtagaaaaaggagcagcagcaggaacaggagcagtagaaaaaggagcagcagcaggaacaggagcagtagaaaaaggagcagaagtaggagcaggagtaggagcaggagtaggagcaggagtaggagcaggagtaggagcaggagtaggagcaggagtaacaggcacgaagaccattaacaatgtcgggaataaggataagtgttaattatgtgaaaactagatttgtataactatagagcggtgaaatgaagacgcaaagtgagaagaaatctctactatcgattgtcatctcaacgccatctatgatttattttgtaaaagtaagtaattattttaaaaagtaggtacctacttaagtaaaaaataaaattttaacaccttaaatacctacatatatattatttttaattatttcattttattttgagattctgtgtcttatgtctttaaagttggggaaagcaaagtagaatgggattgaactctccttgcaatagtattgagtaaaatgagataataaaaggtccattatacactcacgggcaatgaaaaagttccactcacaaaattccgacaccaaacgaccccaattttttcaaaatttttttaaaaatttgaacaaaatattattaatttagttgatggtatcctgatgctcagatcggaagagcacacgtctgaactccagtcacagcgatagatctcgtatgccgtcttctgcttgaa

SEQ ID NO: 810 - DNA, 513 bp, Plutella xylostella
ccccccccccccccccaccccccccctgtccacacacgacgctcttccgatctttgtgcttagctttaactatatgggatctgtctgcttccgctattgtcaaagtacttacctaaccaaaaacataaccttataaaatgcaagcaaaataatcaaacatcccactaacaatcctcctacactctcttttccgctgtcgcaatggatgtcgtatctatgttccactacttcacgtttgccatggtgtgctacatggcggtgaatgatgagaagcagatggagacacccgctccggtggagccagccccgtgcgagcgcggctggtgggccagcatggccaagagaagcgaatgccactaagaagtgaacatcacatatatatttctgacaattacagtccaagtaaaaatagtgatcctaaaaattggtttgataatgtaacagtaactgtctgttttgttagttaggtaattaattcatagtaaatacatatacaataccatcacaaaaaaa

SEQ ID NO: 811 - DNA, 712 bp, Plutella xylostella
tatgctgccccagcagtcagctatgctgccccagcagtcagctatgctgccccggcagtcagctacgccagctccccactgaccacctccgtgtcaagcagctacatcaccccagccacgtcgagccacgcccacctcccgtccgtcagcagctacgtctccccttcgtactccagcctggccgctgccccagctctttccagctactctgccccggccttgtcaagctattctgccccagcgctctcaagttactctgcgccggccttgtccagctactctgctccagccttgtcgagctactcttcatcaagctactctgccccagctctatcaagctactctgccccagctctatcgtcgtactcatcgtcatcgtacgcctccgccgccccggtcgtgagctacgtgccagcgtcgtactcagctctggctcacgcccccactcatgcagtgtacccgcctgcagtgtctagctacgtcgcccccgcagtatccagctactcccctctctcgacttacgcgtcgtccagctatgttgccccggctgccagctatgttgccccctcggtctcctacgctccgtcagtgtcgtactctgctcctgcagcgcgctacgagacggttcgcagggtggtgaacgtgaacaaggtggtgtcggtccctcaagtggtgaaggtcaacaagctggtgtccgtgccccaagtggtgg

SEQ ID NO: 812 - DNA, 833 bp, Plutella xylostella
tttttttttttttttttttatcgcgtgatgtgttttggttttgtataagtttattttttatccacacacaactaactgttgtttacgatggtatattgaggtcgcggcgaaaatggaggttgctaaagcaagcgaggcgcccaagatgcttcccatggtgatgtgcggagaccactcctccttcaccaagtccgaggtggcgagcaaggagtctcgtctggacgccgacaagtcgcgggagaagttcaacacctcatactcgaggctgtctcccacgccatcgcacacccgcgcggaccaatcagcaaagggtctgcgaacgtcgtcagagcacgcgctgcgattggcagaagcaagacggcggggtacctcgcttgatgcaatgcaaacaggggacgcactcaatgcaccgggcaaccgcgcgctaattcaagcggccctcggcagtttccactggcccccctacctgctggccgtgtgggtgttggtattgttgctgacccacctcctccattgtgtggttaatatgctggagaagtcgctgcctaagatcagaaacgcctgccaatacctgcgcacccacgtagaagagtcttggacgtctcccgaacaacagaacaaactgtaccccattgtactcgggctcgccacgtgtctcctgtactcagtgtactcactactgtactcagtcctcgcagtgtgtgcttgggccgtgcggccgctgtgtgcggaggaagatgtgcagagtgtggaggggcaggatgaggagaaacgacggtagttgtgtgtgtgggtttttttggtgaatatatttttgtgagatgggaaaaaaa

SEQ ID NO: 813 - DNA, 581 bp, Plutella xylostella
ggggggtccttgtcgcagcagtcgcagcagcagcaggggatgcagcagcagcagcagggccggcaggagaagttgcagcccattgttgattacttatttgtcagtctatctgttttgaacttgagggtagtaaccctgcggcggcgggacggggtaggagccggggggaggagggtatccggggtagccctgctgctctggcggagggtatccggggtatcctggctgctcggcgaaggtcggcgggtggtgaatgtgctggggcggctgctcgaaggtctggggcggatggtggatgtggaccacctgggctggctgctcctgctgcccgcacgcgttggggcacaggcaagggatcaggcagcaagcgctcagtgccagacaacacgggttgacgctacagcagtcgtcgccgcagtcgaaagaaaagcagagacccatccaggccttgtagcacggggcgctaataagacgtgataaaagttctccgtcgcgctcactcttgaggctgcgcgatgtgagtgagggcgatgcaaaacttttgtcacgtcttaactgcgccccgtactagcccttctgtt

SEQ ID NO: 814 - DNA, 509 bp, Plutella xylostella
aattatacgtaagttgagagtagttaggtactatgtattattttgacgaccgaatggtgtagtggttagtgaccctgactgctatgccgaaggtcccgggttcgattccagatatattacaggctctgcctagtttggcgtcggatggctatgtgtgagatatccccacatattcactcgtgcactaatgaaacgacaccctgtatacaaattaactttttatatcgcttaaattaatttattatcatgagctttgtacctgtatttgtaatgaagttatgtataaggaaatgaacaaatctataactaaataattaattatacgtaagttgagagtagagacatattgtatttttgtacctactaggtattattgggagtttttactgcattcgtaggttaatcttccaaaatatttatttgtactcgcttttcgtagataccttctagcttaaaagtttttactttaaataataaaataaacgatttgtaaaaaaaaaaaaaaaaaa

SEQ ID NO: 815 - DNA, 581 bp, Plutella xylostella
ggggggtccttgtcgcagcagtcgcagcagcagcaggggatgcagcagcagcagcagggccggcaggagaagttgcagcccattgttgattacttatttgtcagtctatctgttttgaacttgagggtagtaaccctgcggcggcggcacggggtaggatccggggggtggagggtatccggggtagccctgctgctctggcggagggtatccggggtatcctggctgctcggcgaaggtcggcgggtggtgaatgtgctggggcggctgctcgaaggtctggggcggatggtggatgtggaccacctgagctggctgctcctgttgcccgcacgcgttggggcagagacaggggatcaggcagcaagcgctcagagccaaacaacacgggttgacgctgcagcagtcgtcgccgcagtcgaaagaaaagcagagacccatccaggccttgtagcacggggcgctaataagacgtgataaaagttctccgtcgcgctcactcttgaggctgcgcgatgtgagtgagggcgatgcaaaacttttgtcacgtcttaactgcgccccgtactagcccttctgtt

SEQ ID NO: 816 - DNA, 980 bp, Plutella xylostella
tttttttaaagaagaaaactattgtccatggcaagtttaccttctcttcttgacagtgtcagaaatatttttgatctattttatttgttgttttattattttgatatcagtttatttttataaaaatgcttttgcacttttttcttataatacagctgctttgtatgatattattcttgaaagtgactgtcccggtggtgtcccggcatgtgggacagtacatgaagatcatcatgagaggtcccgacacctacacgagaacaggccttaaagaaaacgaagtagaccaggacagggaagcgatcattcgcaggtttccactgcaatcaatgatgtacagaaaattctacgactctagtatgaaccagaacgtgacaacacagagacaatggcgttcgatctctccacacaacacggaatctaaacctctgaacagacgacggccgacaatcggcccgatggagtacgcaccagccgacgatgacacaccgaggaacgctaacttctggcgaccaagcaactggttcacacagaaactccacaaacgcacagcagcagcgacaaaggctgaagaatctaccaccagtctatcaccgttttacaaaaacttgttgaaaaactcagaagaatcacatactggggataagagtcaacactgtccgtgtctcagcattttaaacgagagaagagacgcttttgcaatcgaaaatgttgatttacggcggaatattagacaaacatttgtgttgaatttgtttatgcggtgaagagttctgcgctcatgttattgctacagccgggacagaaacgaccatgtgtatgatttttatagaatacacaggttgccttcatattgtgtttttgcacaataattatgttttaattatcatattttatgatgtcttctgtgaaatggttttgataatattataccttttacactcactttaaaaaaaaaaaaaaaaatattttgtaaaatt

SEQ ID NO: 817 - DNA, 514 bp, Plutella xylostella
tttttttttttttttttttttttttttatttatgtttatttattctttgagtcaatatcgccttcaaggcgtaacatttgtctttcatagatttgtaattacactttaataaataaattacaataaagatttggtaccgagtgttcttagacatcgtaacaacatgtagagtagaatatttacaaaacgaggcttcactatttacaaaaatactagttcactttttactgtctcgttaatacagcagctaacgttcaaatatgcacgcgggccacggaacgcgggggacaacctctgtttgtatcactgaatatatgatgaattctactgctaacatattattagcattcacccacgcacagacggaaggtccactcacagttgactagaaaaatacagttcattttctattttccaaaaagtgtaaccattttgttagagataacaagagttcctaacagatcggaagagcacacgtctgaactccagtcacagcgatagatctcgtatgccg

SEQ ID NO: 818 - DNA, 1362 bp, Plutella xylostella
gttttcttatgacagcatggtgacaaaattctattttgttgacaggtgacaccgaaaaatgaattcaacaataaaatttaccgaataaataaaacataaatacttacactctctaagctctaaaatatgaatatgtgtcttcaagatgattgttaagaagtctcaggtgaaccgaaccagtacaacccctatgatatgaaagcatcggacgatgcttatcttgagccatcttggaaaaatgttctgatcacaaaccacagcaaacaaaacttctacattcataactttgagtatccaagcatccaacaaattaaaaatgtcatcctttcaaattccattcttataattttggcgttactaattttgctcggctgactgcatagctgaggattagtttcaaggcagaagaataaagaaccaataacaaggatgatttgcatgacagctttgacggcgtttgcagcagtgactctggtagcgtgtggacccatcgtctgcgagaaagtactgaagtgcctctcaggagaaaaagccagagataagaagactggggttggttctcaacttatcaagcctgctgactctggcaccaaacctggtgccccagccaaggctgcagccgcgcccgccaagcccgccgcccccgccgcagccaagcccgccgccgccgcagccaagcccgctgcagccaagcctgctgccaagccagccgatcctaaagctaaacctgcttcagctgcagctaaaccggctgctgccaaaccagcagctgcagccaaagcgccagccaagccggcgccgcctgcgcccgccaccgccacaccgtcgcccggagcgtcagccaccagcctcaaatccccgacccccgcggctactcccagtgccgcctccgccgccgccacacccaccacgcccaagtctgccacacccacacctacgcctggagctagtccagcggctgccactccaaaaggatctgacactaaagttgcagctaagccagcagctcctgctaaagccccggccaagcccgcagccgcttctgcgaccaagccagctgctgctgccgctgccaagccggccgctggcgctgcagccaaacccgctgctggggccgccgccaaacctgcagccaagtcatcgagtacagcggccgccgccaaacctcccgccaagccgggtgacaaaccagccgacaaacccgctgacaaggcaccccctaaaccaccagctaagaagtaatctactaatacggtgcgagggattacgatgaacaaaaaaatggtgtaaagtaaaaccaaccatgttataattaatcaaatataaatgtttgcaatatactaatcaccgtgtcaaaaaaaa

SEQ ID NO: 819 - DNA, 705 bp, Plutella xylostella
gtgggggcaccgatataccatgtaacccctatgaggtcaaagattgacattcagaatatggatgtgagtgtcaagcagtgtcccgtaagtcacacgggcgggggcgggcgcagcgaggggcgcgggccgcgagggccggggcgcgcgggcggactcatccgctccatcatgaaccgcggcagcagcgagtggtccaacaccagctccatcgagcacgcgtacggcgacgcgcagctccaacagaccaccaacaagagaagcatcctgtcgcgctaccgagacaaccccttcacccgccgcgccgaccacgccggggcggagttcaagatgatgtacgacgacatcgagaccaccgtactcactggaaaagaaaaacgcaatgtaaagaagaaaaagaaacacaaatcgtcgacggacgaattgagcacggacatgaatctgtggtctgcggaacaggacagctccaacatagagtctgacctgagggcgatcgacagcggccgccggcagctgaagccggggcgccggagacgcggcatccgggagagcgtgggcaggttcttccgatatgacaactcaagtctagagacgacggacaaagagagagcgagagaaagagtaaaatatagggaagatcctgcaccagcggcgcctgcagctgatgctccagccgcgcccgccgccggtggggctccggcagcattt

SEQ ID NO: 820 - DNA, 513 bp, Plutella xylostella
cctacatataacctagacctaactcctcgaggacccgttcagttccagccgtgcgacagcgcctcgccctcccagccctggtgctcgtggtggtcgtggtgctcgtggtgcactggcaccggcacgtggaccagcttctccacctccaccttcttgtacactggcacgtgcacgtgcttgatcacctcaacaggcacgtgcttgatgacgggcacctccttgtagacgggcacctccttgaccacgggcacgtggaccgggacatgcaccttggacacgtggtggtggtgcaccgtgtgtaccttgtagggcacgtggatcttcacgtgcttggtgtggtgtcctccaggcacgggggtggcgaccacggacacgaccacgagggcggcgagagcgagcttggcgtacatcttgcgaggagtcggctggactgatatcagctgctgagcgactgcttggagagatcggaagagcacacgtctgaactccagtcacagcgatagatcgcgtatg

SEQ ID NO: 821 - DNA, 1187 bp, Plutella xylostella
tccaacacttctattttagaacaaatcgacaacacaacatgacataaatggttttcttttgataaaaaatactgaaaatactgatttatttggtgttgaataaaatttcaagttacatcgtaaacatgacgctaataaattaaatataggcctcacagatattttttcactattcttccttgtgtaaggggtgaccagggctggtggactcatgttgaaccgggagtcgacggcccagctcgtggtgatgtcgtccaacagcaaggagctctcgcaggaggcgaaacaaatgaacgacgacatcatccagttcatgcgcaagcgcagccgcgacccgctgtgcggcgccaagtacaccacccttgtgcacctcgagcgcaagcgtcagaaggcgctgcgcgcgcgccgggagcccgcgctgcgcccctcgctgtactccagcaagaagcgaggcgaggagcaggacgagaggagcccgccctcgcctgaggagccagctccagtagagcgtcgccgctcggagcagcactcgcactctcgcacgctgcaccactcgcaccactcacacgagccgccggcggaccggcggcgcggcggcgacgacggcggcggccgcggctgccgacccaagaagcccaagtgcggcaagtcgcaccgcaggcgatcgtcgcatcgcgggcgcgacggctgcaagaagcgtcgctcgagccgacgccggtccaagtgcaagccgaagcgtcgccgctccaagaaccgctgtgccaagaagccgaagcgccaccgctgcaagccgcgccccaacaagtgcaagccgaagaagaaacgccgctgctaaatgcaacaactgcagagagaaaaccaacggttgacacgagagttattaaggaaacatgccaacggagatgcaagcgtttccaccggcgccgcgcgagctgaggtggatagcaacttcaaacattgaacttttcggattgattaacataatgctaatctacgtcacatgtccaagtgttcgttacaaagtttatagtattttatcctgtaatttttatagtaatgaagtttttatagtcatgtctacgatatttttaaatttttggcggtctaaattattattagtcaaatttttaataaacatttttatgattataaagtcgtttatttagaaattaaatataggataggcc

SEQ ID NO: 822 - DNA, 872 bp, Plutella xylostella
gagccgcccctccgcgtgcccggcgccgcccccaccgccaccaccgccgccgcaaccaagcgcttcatagtctgcgagctcaaggccaccctcccggagatggcgccaccgcagcagcaagagaagtccgcggacaaatgctgtaagtgctgccttaaaaacatcaaacctccaatttgctgcaaatgtccgccgaaagagccccagtcgccaaaagaaccttcgtcaccacaagagcctcagcccttgaaacagcctgttgattcctatgaactaataaaggaagtattttctaataagctgtcccaggcccccaatatcccaccaatgaagggtactagttgctgtaatagatcgcgtaagcagtcgcctccaaagctgattgacgaaggttatgtggaaatgatactggagcagtttgaaaagaaggatgttaaatctgataggtccgaagggagtggtcgggggcgcggcgcggagagcgcgggggagtgccggcggccgggctgcctgcactggaagcctccggcaccatgtgtgtgggaccagccgtgccgggccgactgcttcgagacgcatcccggccaccatactaaagtcattagtcctcctcgcgattcagaggcacagggcgaagccccggctcctcgaactaagtataagctactgactgggtcgtgtgtcgcaggttgcggcgaggtgcagggcgctcccggcgcgccggctgcaggcatgcccgtgctgatcatgaagatgctctgaagaatggctccctaactcaagttttaagaaaaagtgtaaaatgttatgaatcgtaaaataaaatgatgtcctgttttgtgaaaaaaaaaaaaaaaaaaacacacgccaaa

SEQ ID NO: 823 - DNA, 598 bp, Plutella xylostella
ctactctgtgcgtacttccaaataaaaaatcacaatgggtttgctacttagcttgtcggtgccaaacactagagctggtcaagggttagtcactgtggtggaagaattaaccagtcgttgactgcccagtgtctatttaaccctttcgaatgatgacaaaccttttgtctctcgggtcctctacgagcgatatttgaagataaaggaggataaactatattacctacctactctgtgcgtactttcaaataaaaaatcacaattgttcagaatgatttcaccgcgtggtactggtagtatatctcgggtaggctccttatggtgcaacgctcgctgtcaagctgacgaagacacattccacagttcagaatctcttcagaatggactccaacctaatcatttctcatcaatagtttttacaataaatacttaattcatttcgaaattgaactaccttaaccagcctaattcatttcgaaattgaaataccttctttaaccgaaccgtttaccgtttaggttgcagtagtcctaggtaccctaatgcagctataaaactaaaagtaaagcatacctatcaatccatcaaatcagtttta

SEQ ID NO: 824 - DNA, 598 bp, Plutella xylostella
gtcagcatagactaatattgttggttgtcaaaaaaacacatccaaatatttgaagattttttatcgagaaatatttataaacgacagccatgagtgaatatattcaccagagcgacgctacgattcttatgactgttgaaaacctgatagccagggccatgggccctcctgatgaaaacaaagtggacttcaagataatccaagagctacttgtaatctttgctcggcaacttcgtatgctagaacatcatgtcgagttaaagcatggcttggacgccgaatttgattctgctgattggaaaaaagatgttgactagtgatatacaggctgggaaggtctcgccaaattgccagaaggtgataaactgccagaaggtgacaaagacccaaaaaagacaaaagaaatgtgcccctaaagaaaggaggggagggttaaagactacaaaaaagacaaaagaactgtgtccctaaagaaaggaggagatggcaagtcagaagatgctaaaaagcttcccaaagttggtgaaaacttgaaggttaaaagcaatgtgaaggatgaaggagagacggaggacaaaggtgggactggaagagatgg

SEQ ID NO: 825 - DNA, 598 bp, Plutella xylostella
attttgaagccaagtgtttgaatacagcgtgttagcgagttttttcacgctgtttgttagcaattcactgtgacagtcaattgtattcaaaattaacttttgttcgtagtggttcagtttggatacaacaaaaaagtctacgtacagcttcataaagcttattccaaatcaaatttctatggttattattagtttctcagagttcattcagactgggatagacttaaaaaaatatatatgaacttaatatttcatcagtgatagccccataaaaaaatatataaataatttatacgactgcatattagttctaaaaagataatttattttattagcttttcaaaaagaccatctttattatcatcatcctccgacaatcatcagacggaccaactcaactccatcatcagcaccaacccacaataaaaatgctgggcataattttctcctaaaaagcacaacactttgtcatcagtcgtcatcatccagccactaccaaacatcttcttaccaataccaaactcatcacaaacttctctttacaggaaaaagctctaaagctaaccgaacgactagcctattcaaagaacattgacat

SEQ ID NO: 826 - DNA, 598 bp, Plutella xylostella
tctagaagtaagtcctgtagagatatcggacgaaatactgacaaggatgataagacatactcaatagacaataataatgatcatcataatcaaaacggtaacttaaatggggaaaacatatctcagttggctaaataccaacaaaacatagaggaaaaggcgagagcgaataacatgtttactactcagactaaacttaaacatagctacagttttaaagacatgcctaacggatatagaccctcaactctgaaaagagtgaaaagaagaaacttcacggaatgggatgtagaacctaacgtgaccaataataaacatccaccaataccaccacaacgtagagattctctaaaatatgctcatagacaaagaaaagttgattccaaaaaaagtatccacacactacctgatcctggcccagttccaccagatccatcttctgaatcatattacgaatactattcgagagtaagccagcaagttaatgacactgataatgataaaatgaaaaaggtgcaaatagacacaagtaaagagaaaaacttcatacacaatggccacgaaggtaaaaatggcaatggaagtttcagtaacgata

SEQ ID NO: 827 - DNA, 598 bp, Plutella xylostella
aaatgactacgctcctgaggaaaatgtggaaaactcactccaaacacaagagtaagttgaagttaattttaaattaataggtacttaagtacctactaaatactaccataattctctataaattagtaggtaggtaatattttaagtaaaatgtagcataaagtcaaccttaacaaacttgtgcataggtataaaagactactacgattcactgacttcactgaagatgaccgtaaaactcagtcgaaaatttacaatgctcgttagaataataaatattggatgtttccgaccacgatctatgttacagcaaagaaacgacccgagtacagcttaggtggatagaagcggtcagctatattgaaggcgcggtacacaacaatcaattaagtaaataaagaaatgtcacatgaaatatcttgctcttccattgtagcgtgattgtcgcagtaagtaggtaaggtacatagtagctttacctaggacgaagaggtgcctactaatattatagtaagtacctacttatgtatattataacatgtgctaaaccttagtaagtaagtacctagtatctaacatcctgtctatttaaccaaga

SEQ ID NO: 828 - DNA, 595 bp, Plutella xylostella
tttcgttgataccttctctcataagagggctgtgaatagataaactaccctctgtagacagagcattttgacagtagaccggaggagattttggacactattggtagacagtgagtgagatgtcaaatgtatcgtaaacgggtaaagataaagtcgatagagctccatggctgagcgcctcggccctcgaagctccgaggtgaacgcactagagcagcgtggctacctcatcggcaggaagatcgggcagggctcctacgccagtgtgcacctgtccgagtactgcgatgccgccagccccaagcggatgcacctcgcttgcaagatcttcgacaaagaaaaggccccgagggattttttagaaaagtttttcccccgagagttggacatcctcaccaaaatagaaaatccacacatcattcaagtgcacagtattttacagcgaggaccgagagtgtttatatttatgcgatatgctgataatggtgacctcttagactttataaaacggaacggtgtcgtcccagaaaatcaagcgaagctatggttcagacagatggcgagcgggttgcaataccttcatagtaaaaatata

SEQ ID NO: 829 - DNA, 595 bp, Plutella xylostella
tttgatcgtgttattatgtcatttaacatgtcaaatttttagtgactaacaatggctaaaatttgtttggctacaaaattataatgataataaataactaacagttaaacctactatctaaactaatattttaatacattttaaaatcataacaaggcatcatggatggggagcccgattatatgtcggataccggcactaactgcaaccttcacactacatcagaaacatacccagagaatcttaacaagctggaaacattagagaagaaagctgttcatcttagattagtattggaaaaggatttcaaggcagctgatatgaaatggagtttattcgtggccgcagcgtttagtttcagatatgaaagctgcttgaagccgtttccaccagggtactggaaaaatggtatcaaggatatggatgaactgcttagtactataaccgacgtaccggcacttgatttacttctgcgtcaactggataatctagatgatttgaaaagctacgccgaaattatagacctcctgttttatgtcctagtcaggttgaaagaacccatcataaagacagttccaatagaatcgcatggaaa

SEQ ID NO: 830 - DNA, 595 bp, Plutella xylostella
gtccgcacatgtcggcactcagaataataaccgtactatgtattgggtacaaatctcggaataataacagcttcgtccttataagatcctcctttgccagttgaccaaacagtttcaaaactatcaactgatcaacactaaacaactgatctgacgtttattacatatcaaaatggccaacgaagcggaagaaaccgtccgtaaattgaccctccacaagggcgtagccggagtaataatcgtgaacggcgaaggtatacccatcaagaccactttagacaaccacacttccgtacaatacgccggtttgatgtctgtctgtacaatacgctggtttgatgtcctccctggtggacaaagctagatctgtggtcagagacttggatcccacaaacgaactgaccttcctgaggatacgaagcaagaagactgaggttatggtggctccagacaaagattttatacttatagtggtgcagaatcctacggattaaccaaggcttttgttttaggtatggggtagatgttttgtgtatcattgcaaggatttaaatacaagccctacagaatcctacggattagccaaggcttttgt

SEQ ID NO: 831 - DNA, 594 bp, Plutella xylostella
ttcggtcgaatgatgtctggaatcaaaagtattggaaaacataacaaaacaccgacagttaaaaaaaagcacagaaataaaaaacgtaaaggtaaaaaacacaaggctgacaaaaggagtgttcagtcagtatgcagaagaaacgcttttcagaaaataaaggattttttcaaaatgtcagaatcactcgagccacacaataaaagccaaaatgaagctcctgaatctgatgatttaggggaaactaaacaaaattactttaaaccaatcaagtatagtagaatggacaacatgaatgatataatgaaaataatgccagatatgcctcatagccaagaggactcatcggaaaaaagacatggatcggcaaaaagtgaaagagattatctaaaggagttaccagagaaagaatggattgataaccacaaattcggtcctttaacaactgtagataattattattccgttcaaagaagtcagtttgatgataaacctgtaatccaggacgatgatataaatagagatgacaatatcagcttcaatgacaatgtattaaaatcatctcgaagaaatgagaacaaacccctcaatgta

SEQ ID NO: 832 - DNA, 593 bp, Plutella xylostella
aaccgcagagggtgacgactataggatatgttcagacgattgtgtttgtgaggtatgtaatacccactctggtatatggacaaataaatctgaaaatgcagaaaggataaaaaagaaccagcttagattcagctaacaaccgcataataggttctgaacccaggaagaaaatcattctacagcctataaataaaaagttacaatacgattttcgatacacatatgtcaaggcgatatgtaccaacatgggtctcaccaacatagacgcgatgctcagcttcaaacatctgcagtacatagacgtatcccacaacaaactcactttagtcaaccttcaagtcctaacgaaactaccttacgttctgtttctacaagctgatgataataaacttgattccgcagcgctcaaccccatggagtaccttcaagtgatagtaatgaactacaacaaaataacctcagtttctgatgtttaccaaccagaactttccactctggagctcggtcacaacaaaatagacgaagttaagtttgaaaggaagttgaccaaactacgctgccttgacttgcggtacaataatattaaagtcatg

SEQ ID NO: 833 - DNA, 593 bp, Plutella xylostella
ttctcagcgctgtgtttctcattgtgtggtaacgaagctagatgtgacaaggttcctagccgctgactgataccactgtcgatagtacgtcggtacttcaaacgctagcgtgcaattaaaattgttccgcttcttgaataggtgtagtgtagccattttctaagggactgtgcgcattgcgctcattatcgtgcgcttttttataatacttaacggtaggtttcttaattgagaatttcttacttgagtgagcaaatttgttactatgcacattgttgcaaggatgcatatttatttagttaaattaaaaagtcatggcgaaaacgtaacctaagaaaaaaattattacttccattgcattagtaggtacattactaggtatgcaaggtagttgcaaaacgaggattttttcagtcctaaaagtcatgtaatattgtactagtgatctatataaataccatagaattactcctctatcacttaaaaaaaattgtgtatccataccatatacctaacaccctgtacctatatccttacgtctgttacgtgtacagtagacattgtccgtttcgcatatttaggtacaaggttta

SEQ ID NO: 834 - DNA, 587 bp, Plutella xylostella
atctgctgcccgcctacttcattgatttgatcatgtatctgactgggaataagactttcatggtaaagatccagaagaaagtcagcatgggcctcgacgtgctccagtactacaccactaaggagtgggacttcaagaatgacaacttcctggcgctgaggaagagggtttctaaggaggatgataggtgtctaaggaggatgactgcgaggtgttttacacggatattaagcaaatcaactgggacctgtacatccgtgactacatcaagggagcccgagagttctgctgcaaggagccccccgccacgctgccgcaggcgaggaggctgagccgacaattgtactacctggacctagtcacaaagataatgttcgcagctttcgccgtgtatttcgtgttctactacggcaaaatgctactgagcgtaatgtaaatttttatttgatattttgatgtgattttattattttaagtagagcatagtttttaattttacttatgaatttaagtcaacacttataccaatcaataaatttaaaatgtatattttaataaatgttaattttaaatgtaaatctaaaaaa

SEQ ID NO: 835 - DNA, 585 bp, Plutella xylostella
ttacaccccctcaaacctctaatgatggcaccaggacaaaatataatatacaaaatagagtacattaaagatgttttatactttgcgataacaagacatgataaagttttaaacaacactactgatacgcattacttttcgattgatcatgaattaatttatgaaaactactattctgatttcggccctttaaatcttggttgtgtctacaaatattgcacggagttaaatgaaaaactaaagcatttattaaataaacaaaaaatagtgcactatacatcagaggatccaaggaaaaatgccaacgctgcgtttttgttgggctgttttggtgtactatatttgagtttgccgccaaaagatgcactaagaccactcatctctcatgggcagtcatatcggccctttcaagatgcaacgcaaggtgaatctatgtatactataaccatattggactgcttacaagctatcaaaaaagcacgggagcttggattttttaactttcaagattttgatcttgaagaattcgataaatacggaaacatacaaggtggagaccttaattggattatccctgataaattt

SEQ ID NO: 836 - DNA, 583 bp, Plutella xylostella
atgagcatgtaccaccatagtgtaccacaaaatgccatccatcatccgcatcatgccgcaaaatacaaaataaacattaattccgttaaaattaacaagtaaatgtttaattgaaaataaaaaagtggccccacgacggcaaaaaactcaagtatgggaggcgaagctcaccaagctaggccagcgccgcttcctgagagtactcgacaccgaagggtgtaaaatacgtcatggatgtcgtcactaaagaaaaaaaacactagtcgctagtcgtgtaaaatcctaaattattgcaagaactgcttcataaaaaacatggtaaaattatagttaaaaatataaaaacatggtaaagtttctaaattaaattactacatttcgaaattaaatgaattattttgattcccgtaacatcaattaaaattatctttgcaaaacaaaattctaacctacaacataaccaaattaattaattcaaattctaaaaaacccaaacaattcaatccaaaatgattcgcaagaaacccaaaaagcgcccagttaaattaagatcagacatcaaccaactaggcttcacgactga

SEQ ID NO: 837 - DNA, 583 bp, Plutella xylostella
gaaggaacgacacactcacgacaacgatgttacttcactatagacaatgaatattgtggagtcagaaaggaaaaaggtgccattcccagtaccttcaccatctcttgtatatttttaaaggaaataaacatttttacttttactttactttacataggtgatccagaaataaggttattatagttaaaatcgagaatatcataaataggtaattggattttaacgatataggtacgttttctgatataagttttcattattatttttgaaaattttcagttatggaaaaataaatacagaatacaaaaatatttttttaggttgagtcagtaagttactgaaaacaagttgccattctcagtaccattaaaactaaaagaaaaaccaacgccttcattaaaaaaatagcaaaaaccaattatcgagacttgtacatataaaaagaattacaggcactacctactttttaaaacgccttcatttaaaaattagcaacaacatattatcgagacttagtacatgtaaaaaaaaatacaggcactactaaatggctacacaagacaagtataagacacaaaaaaat

SEQ ID NO: 838 - DNA, 576 bp, Plutella xylostella
caccttatatagccactttgtatatagacgataaaactaaccaagccattgaaaagtccatttcattcgtaactaatcaactgactgcactggaggacaaaattgataagttggaagacaataggaaagtaatctcgaaggaaatctctttgcttgacagcaaatgtgagaacatggagaggatcatgagaaagtcatgcattgaaatccgcaatgtgaaaatgacggaatactggctcatcagtgccccgggcgacaagacctgccagcagacctgggacaaatgtacctaagataaaaaacgagaagctcaacgacctatttaatatgatattcgtacctaagataaaaaatgagaagctcaatgacctgtttaatatgattcatacactgagcgccaaactgggactaaaactcgggaatagcgacctgcgagatgtgtaccggatcaacaacaaagctaataaagatgtctcctctgtgatatttgaagtatcaaacaccttattgaagtcgtgctttctggaaagtgcaaagaaatggaacagatctggaagtgatcaactgaacagtact

SEQ ID NO: 839 - DNA, 573 bp, Plutella xylostella
ttcgtgaggacattcaataaatataatcagaaataatatacttctaattatccatcatcttctagatatattgtattttttttcattaaaagtcaggttctaaaactgtttttacaacgacatcctttttttttaaatgtggcaggtgcttaacaaagtaaagcgacattttttgtatttatggaattaaagtatggatgtaattgaacctatctttattataattttactcttattccgatgtattacttcagcgtttaaaatatttttagatacgtttttattgtaataaatttagcgaaattttaattttcaaaaacaagatctcattttaggcaatcatattcttgtatgtataagtttgcctatagatctctaaactttttgggttccaaactgtatggaacacaattttttggatggaaatgcaaaaatattattattacttacaacattttagaatttagattgaatgttttatagtcagctgtcgtaatttgatgatattcatagaaaatttaatcaacaatctcatttaattttagatattatggaataaaactctcaaagcat

SEQ ID NO: 840 - DNA, 565 bp, Plutella xylostella
agaaggacacataaaaaaacagttagtatataacatactcgtacaatagttaacgtacataattggcatggatagtataatcacagtacatactttattatttttacgaaacataagttgtaagtattagattatacgtaggtatctctgtctcaccgaaataaaataataaatattttatctaatctttataaggattgacaaggatctcgttgtatttacgaaaattggataaatccttttaaaattcggtcgaggtcattgagccatatcttaaatattaaaaaagattatcccttatcttcgacattttgcttttaactttttcttcttcaattttattgatgcctgtgagggtgatgaagccgccatttattttagctttgctgtagtttattttaaccagtgagtgttaactccttattatctatcagcttagcacgagggaaagggattcaagcatctgcaagtgtagtttcattcagttataaaaaagttaaaacatataatattatataaatataataatattatgtaaatatacagggtgtcattttcttagtga

SEQ ID NO: 841 - DNA, 564 bp, Plutella xylostella
acggcccgatggtgtagtggttagtgattgactggtttgtcggaggtcccaggttcgaaccgtgatcagggcagatatttcgtcgtcctgggggccaaggggtcaagccacaaattttatgcaaatgagtcagtgcaatgatgcagtcttggaggaggccccatgtcatgaagaggtgtcgtgggggccaagggaatcaagtatttttttttatttaaatgtatcagtgcagtcttggcaaagtggtatattacaataggctgtgcttttgcgtaagtttgcgtgtatattacagaggctgtgcttttgcgtacatttgcgttggttctacaaagccggtgtggtggtgaacctgaaaaatggacctgaagtggagagctttgaccgttacattgaagaagccggcaaaactcgcttaaaaatttagataaaattaatctccattacccctggtcagacagacagacctataaaccaacgcaacgtactaccaacccccctatccattaggtaccctggtcacagacctaaccaacgtacctaccaacccccaaatagcaaaag

SEQ ID NO: 842 - DNA, 556 bp, Plutella xylostella
gtggcactataagttggttgataggttgatacacagagagtaggtaatatagttgatagcatgttgactctatggttgataggttgatacacggttgatagcatgttggtagaaaagagtgctatgtataaataaatttaaattaaagaataaattcgatattaattcaattacctatatcctgaggctatacataaattcttatgttaagagcgctcgtcgagatataaaattttagtctacgggtcttacttctatcacactttaaaaatgcatcgaatgccgttagctttttacttgatctcaataatcgctcttggatattccaggccaaccgaggaagatgacttcgtgagctgtattgacgaaagcagctcctcttccgacgtcagcgaagcagatgccttgaaaaagttcctctactgcttctacaagaagactgacgtcatcaccggcgacggccacatcaagattgataactttctggagaagcttccagaaaatatgcattcagagaaagtgagggaggtgctgaataaatgcaacagtttgaaaa

SEQ ID NO: 843 - DNA, 555 bp, Plutella xylostella
aaggcacacaatgactccgtcttagaccccacaacaatagttgaatctaacatcatagattacaacgctaaaactgccatgatgcaagctttcggaacaatcgacaaacagcagaacgaaaacaacaaacgacttaaacaaaaagcgaaggatatttttaggtggaaggttgaagtcgaaagatccgtgaaagcaatcactgaagaagtgcagctgttggaagctgaacgacaacgactgaaaggagctgctagagtgctgatgcttcctgaatctatttctaaagaatgtctagatctgcgatcaaacagggctattccagacttagtgtcagatttggctgaacaagaacttatcaaagaaatgaaccttgtaactgatgtgagagatactttagaaagaactttgaaaacaattgaagaacagctgcagattaataaagcggctaaacaaaagatcgagtacgatttctgtgacaaacagatggcgtacaatacagaagtgaccaacataggcctcaataccaaatcacccacgattttattcagaccaggt

SEQ ID NO: 844 - DNA, 554 bp, Plutella xylostella
ttcgtatgtgacacaccatcttgttcaatatattgttaatctaaggcataaaagtataggcgactaggttatttatgacgtgaggcgttataatgcgtgagaatattgtagctagggaatgtccgaagacggctagggttgccaaaagtgcaatcatgaaaacaaattaattttaataccgttttatcacactataacgtaaaatgagtaacttatttatgtgtccacggatgtgtaaacgcaaatcacagcggttgtatattgttaatctgcgagttgacccgaggtaggtcattcgcttgtcgtgggcggctgcagcgggctcacgccggcatgtcacgactacagctgatgcggcatgtttagatgtgcagatcttattgtcccccggtgatttagagaaacgatttaaaagacgctgtttgtgttatgttaaactttaaagaaacaaataaaagaaaagataaagataaagataaagaaacatttattcgacacatagacagcaacaacaacaaaaagaaaaatacagacttaaagaaaagaaatacata

SEQ ID NO: 845 - DNA, 552 bp, Plutella xylostella
cctgctgaagcagaaggttgaacagttagacacattattgaaagtaaaagacgagagaatagaagaattgcaaaagcaacttgaaagaaaaacagcaagacgcaaagaaatagaagctttaacaaataaaaagttagatgatgttgaacattcagaaaagtccagcttttcaataccagaagtagaaaaatcatcgaaatctaaaatatctttgactaatgagggtagaataatgaatgaaacacctttgttgaagaaagtgtcttctattgctaaaccgactaatgtagctgaaaggacatcgaaacaatcagtaaccaaacttccagaatgtacatcaagaaagagtattagtcctatcatagaaccgaaagcatctataaagaatatcgataataccactaaaaatattagtcccatagaagcagaatatataccgactgttgctgacatcaaaaagagttttacaaaagcaccagttgacgtcaagttaagtatgacaaaaccaatagctgaagctagggttagtgtaacaaaaccatctgtagagat

SEQ ID NO: 846 - DNA, 547 bp, Plutella xylostella
gagcgcatgccgcaatattgtcaatgtcatcaaaatttttgacatacaaaaccataatctagtaactgaacaaaaccataccaaaatattttatgtatttaaagaagattagttaaaagctgttaaaaaataaataaattaggtacctacttaagtataagaaaatgggaaacatactatggtcgataatttggttacttattctaatatttgctggatggtggatagcacttatagtggtgcctttctatgtaattttactcccatttgcaatatgcttctcagctctttcgccattcacagatatgttgctggtaatagctcagtttcccggtctttgcgctcaaaaaatcaaggctggagaaggattttagaaatatttttgtgcaatactttgattatggtcgaagatgcaatagtgtattttataaaatgatatgtgaaagttttactaatgtatattataggtataatttgttaagttctatcctaatgtttgttttctattaaaatttgttagttagtggtgataagcaaaaaaaaaaat

SEQ ID NO: 847 - DNA, 539 bp, Plutella xylostella
ccgacgtcggctcttccatcaagactgacaaagacagcttccaagtcaacattgacgtgcagcattttgccccagaagagatcacagtgaagacggcagacggcttcatagtggtcgaaggaaagcatgaagagaggaaggacgagcacgggtttatatcgagacagttcgtgaggaaattcaagttgccggaaggttgcgacttggaggccgacgcgtctgccagctgacgtcggttcttcagtcctgcagtctaagctgtcttcagatggggtgctgtcggtggtggctccgaagaaggttgaggcggtgaagggagagcggagtgtgcccatctcccacacgggacctgtgcgcaaggaggtcaaagaagacctgacggtcgaacccaaggatgaagggaagaaatgagttgagtgtcgttcgcttggtaatgttgagactgattaaggttatttgtatgattgcatttgatatggtaaaagatcggaagagcacacgtctgaactccagtcacagcgatagatctcgtatgccgt

SEQ ID NO: 848 - DNA, 539 bp, Plutella xylostella
cggggtctgctgggactccaaaaagcatacaggatatgtagggttgaagaaccagggcgcgacgtgctacatgaactcgctgctgcagacgctattcttcaccaatatccttcgcaaggcggtgtataagatgccgacagtaggcgatgacagctccagatctgtcgccttcgccctgcagcgagtcttctacgacctccagttctcggaaaagccggtggcgactaaaaagctgacgaagagttttggatgggaaaccctcgactctttcatgcaacatgacgttcaagagtttttacgggtgttacttgataagttagaaagtaaaatgaaaggaactatagtggaaggaacggtacccaagttgttcggaggaaaaatgacgtcattcatcaaatgcaagaatgtaaattgttcaagtactagagtggaaaccttctacgacatccaactaacggtcaaaggaatgaaaaatatctacgagtcgttcaacgactacatcagcacggagctgctagagggagacaacaagtacgacg

SEQ ID NO: 849 - DNA, 537 bp, Plutella xylostella
ctaggctatcaacgtcccacagtgttttatgaaccctatttttgtgtcgtctcggtttttttgcagaatcttatagtttttgtcattttaaacgctttggtaaactttggtagagagctccgaagtttctatcacttctggtttatttttaaaagggaaaggatcctgggaatcctaaagtttcactttgtccgggttccgaagatcacagggaatattgttgaagtatggctgtgcgatgaatcacgaaaaatattattaaagaaaaaatattgttgaaaattaaagtgtaactgtgcgatacaattgaatttcgatagcatgcgtgtaactatgcgatacaattgggtttcgatggcatgcatggaatacacgcacatattaggacatgcattatggcaaagtttcataatattaagacatacattatagcaaaatttcatggtattgggacgtgcattgtagcagggtttcatgcatcggcatcaaatctggatggttgctgaaatattcgtattgttctctcttttcattttt

SEQ ID NO: 850 - DNA, 528 bp, Plutella xylostella
gatctctgtcagtgtcagtcaaaactgtcaaaaatattcaaattaaattcaacggcaactcgaatcttagctctaaacaacgctttgaaaagttatgaaaataatgtcaactttattaatttcgttcaacggcaacgggcaacggtcgggcaacggctcagagcttttgatttgttcggttgatttgtttgttggttgatcaaatcaaatgtaaagttaaatattttgtgaatttattcaacaataaggagcgatggatatgaaaacggaggttttggaacttgaaactaaaattataaaccacgaagcgtacgggaatgcgtcgtacaattggtccccaagagacttcgagctgggctccggtctgggtcagggcaagttcggccacgtccatgtggccagagagaagaaaaccggatatctggtcgccatcaaaactttgttcaaatcacagatcatgaagtctaaatgtgaacggcaggtgatgagggaaatcgaaatacagtcgcatttgaaacaccccaacat

SEQ ID NO: 851 - DNA, 526 bp, Plutella xylostella
ggagagccaggcgcagtgtgatatggatcagagtaaagtaaaagtatatctgataaactatattcaggaaggcaattgcttcgcagcacgcatgaagttaaaactggattgcgaagaggaccatcgggaggtaatggcaatgagccccgagtatatagtttgtaacattgccaccttaaaggttaaagtggagatagcatcttattcaaaatatggtacacgtgaatcacgaatccacataataaatgtatcttttgagttcagcaaacgtattaaagactgtttaaactgtatgttaaatttacaaattaacaacagctcccgtacaatcatatctacagactgttctggcggatttatacaggcaccggagagttacagcttatccgacctcaagtctgggaatgtgaatgttgcaggtgtcatagacattttcatggtacccaacccatgcagtgttttgtatgacgacaaggacctgattgacttcagtctgaagggaatagatggatcagtggatttccat

SEQ ID NO: 852 - DNA, 521 bp, Plutella xylostella
attctggaattcctcaactcagaataatggtgaaaattaatacgtttaggccagctgtcagcccagttttctcaagcagatttatttattatagaaattattataatattcaaaattaaacgtgccttaatataatgagtgacttaggtaggcttgagtaacgagtgagcaataacagggaggtatcttaatacgtacttatacctaaaatgctaaagatttatgtcaccaggttaacccagacaagttttctttccctgatttattaggatcccaagcagatttattactggaatttattaaacttccgtgttctttccctgaattagaatcccaagtagatttatttttatattagaaattattatattttgcctttgtaagtacatactaggtacggtaggacaaatgactacatgaatccaatttgatatcctggtttcctaaagcagatggtaccaatataatgggcttggtcaggttctggagatcttaattacttagctcatctttttgtatat

SEQ ID NO: 853 - DNA, 521 bp, Plutella xylostella
gaaagtcgagcgatatgtttacggcatcaaatcaaacagtatgattacaaattaaattcacaagtaatttaaaaattaccgtagttaaatgcggaaagttttctcacaatttaaacttaatgcggaaggtttgctcacaatttaaacccgggaatgaattcagaacaccctcacaatgttgctcgaaaggaccactgaagatgacaaaaaccagaggtttatatgctacacagttgcattgatggttttactttgctttgtgaggctcttacaatacttgggcaagcggcgaaagcgatcaagaaacctaacagtaaatttccgtgaaccgtcattacaaaacacttccatcgacgatgggagagccagaaccacgagacaacgatacaatccaccagaaaaatggctgccgaaaagacaagtggccagaaattttatattagacgaaccccaatgaaatcttttagagccccgtttgtaaacaaaagtgtaagtaataaagtgctttctgtctccaaaaa

SEQ ID NO: 854 - DNA, 520 bp, Plutella xylostella
catgagcatgaaggaggtggacgagcagctgctgaatgtgcagaacaagaacagcacgtacttcgtggagtggatccccaacaacgtgaaggtggcagtgtgcgacatcccgccgcgggggctgaagttatcttcaaccttcatgggcaacaccacagccatccaggtgatcttcaagcgtgtagcggagcagttcactgctatgttcaggcggaaagcgttcctccactggtacactggtgaaggcatggacgagctggagttcacggaggctgagttcacggaggcggagagggagtctgagtccaacatgcatcaacatgcacgacctggtggcggagtaccagcagtaccaggacgcagcggccgacgacgagggagagtttgaacgcggccgacgacgagggcgagttcgaggaggagggcgaggagttggagtagcaattacttctctttggtagtttagttgtgattgtccatgtgtttgtcctgaataaaactatttctaccatggtgggaa

SEQ ID NO: 855 - DNA, 518 bp, Plutella xylostella
tccatcaggactgtggagtacacttcagacaaacacaatgggtaagccactttcacaattttgaagattccacaaaacacatgacttgcaaaattaagtttgttcaacaatcaaccgacggcatcagcgataaagcgaattaacaagataatttgtgctatttcacatagtgcactctcattgtctagtcactgtaattgaatttattgtgtaaaaagttaaactacatattaatcttcatactatctttgtttcagtttcaatgctgtagtgaagcattcgggccccagccactccgttcacatcgaaagccatcataataactagaaaatatcagtagatgttaatagttaatagactgaatgtgatatgtagaatagaaaacgttgttactatatttataataaacgcagtattacattagcttgctactgtataatttgttgtgttatttaccgatacctcagctacataatattaaatattttaatagtagtttaaagaaaatgaaagacaaa

SEQ ID NO: 856 - DNA, 518 bp, Plutella xylostella
cttggaaaaggatatcactgtcaatattcacaggatggaagtattcagaatggaattctcttacgacaaacacggaagaatatcacaaacaagaacccataccagaaatgttggtgtaaacacatacactaatgtgaagaactatacatgggattgcgatggtcagttgactggagtagaagctcaagagccttggggctttagatatgacgacaacggcaacatgttgtcattgacatacagaggtaacaccataccaatggaatacaatgacatggaccgtattattaaattcggtgagggccaatacagatacgacagccgcggttgacaacggcaacatgctgtcactgacatacagagggaacaccataccgatggaatacaatgatatggaccgcattattaagttcggagaaggccaataccgatacgatagccggggcctggtatcacaaaatgctagagaggaaagattccaatacaactcaaagggtcttctaattagagcaaccaaa

SEQ ID NO: 857 - DNA, 515 bp, Plutella xylostella
cacgaattcggccaacccacagatatgtccctctggattgacgagcggcaaatacggatgttcagcggtatttcaatggaagtatatgcgatagtgaacggcaacgtttcgccctacgtgctggacccgaatttcaaacggcaacgtttcaccctacgtgctggaccccaatttttctacaaaacttcccatcataccgtcagaggttggatacgttaactttacgtggatgtcgtgctgtaaaaagtattattatcattttgacacactgacgtcatcagatcctaagatattgaaggcaccatacctgtccataaagaaaaagggaagagtgcctaaaaaagccaaagaatttagccttttcttgccatgtgtggaaaacaacagtggagtggtaactttagaaataggattagttttaaaaaccggcagaggcataccactgaaaggtactcctttaagactaagtctaaagaaggaatgcgcacagagaggtgtgtatttagcaagaacag

SEQ ID NO: 858 - DNA, 509 bp, Plutella xylostella
catagagacggcagatctacaagcaagcgaatcacaacattgaggtggctatagagacggcagatttacaagcaagcgaatcacaacacgatacctacccgagaaactaaatactttaacatcagctatcccgccacgaagttccatcctccgacaatagatggcgctaagtagcgaaacattgaaatgcttacgcgaaaccttgaaatgctgatgcaccactagcgaaaaattgaaatgctgatgcaccagagatacggagcttgggaaccagagtagctgatacggcggacaacacaaagacacggctgcaagttttttttaaatattgaatatggcagataagctaaaatgctgttaaaggatagaaaagtccgagttaagctaccttggaaacttggatcttcacaactgcgttattgacaaaacctgatgaagaaattaagttcaactataggtctgaattttattctttgctcaatttaaggaacattcaatcttgcaaatag

SEQ ID NO: 859 - DNA, 508 bp, Plutella xylostella
ctctatggtttctgtccacctttatgacctttccttatttccaagtatagataagttttgatttcagatgaattttgctcctgaacttcgtactcatgctcaaaaagtttgtagtctttataaaagagcgttacgaaacttagaatcctactatgtagcaagatttgttgttcgctatcatcaagtgcttttgagaaacgaattcgacatgaatcaatgcattacggatccaaaagagcagcgccgtttgctatggctgggagagcacgagttgttcttgaaaaagaaccctttccagtgtgcaaagtttgctaaatcttatggcattgccggtggggtagctgttgaacgtgaggtagatccacctgactgggtgttggactactggcatcccttggaaaaggcccgctatcctagctattttgcttgcagagaacatcgcaagaatgattacataaagcactggaatgatgatagtcttctttgaacttaattcgaatacaaagta

SEQ ID NO: 860 - DNA, 501 bp, Plutella xylostella
ttgtcaatgctagacactcgaaaagatgtgtgaagttgtgcttttttcacgaggaaagacagctgatacaaacaaaaactacccttattcgaatgtaataagggtcctgtcagatgtctttccccgtgaaacaagtttaagtatagataagtgggtgtagagtccgcgccaccactgattttttgcggcaaaatcgagaactaacttgcctattaaaactatacactcgaaaagacatactatctgacatttcgtacaaaaactagaaactcgaaaagatgtgtgacgttgtcaatgcatctgtcatataccatgtcaaacatgctttccaagcttatattgcaggctcaaatattgccaatgccaccatttattttatgatttcaaaaggaaggataggcccttcagaatattttactcaaaccttcttcatacaagcaaatttatttagatttttttgcattgaagtcaaacgttatcgagtctattttaacgtttcta

SEQ ID NO: 861 - DNA, 496 bp, Plutella xylostella
taatatcattttgtgtctcctttattacgtcctttcttgatatgggcctaagtgtatcctcatcaatataattaatatacaatgacttatcaaacatttcccgttctaccatatcattttttatagacatgtttatagcccgtgataagaaatctgccgtgttattatcgctctttacatactcgatattaaagttatacgcagaaaggaaaagcgcatatcgctgcagtctatttgccgccatttctggcacaccacgcttgctaccaaatattgaaattagaggcttgtggtcggtcctcaacgtaaaaggctcgggcgtcgtcctacacctcgctcgaagaccacgcgatcatatcgtgggtgtctctggggcagcgagcgcggggcgtcaacggtacgtccgtatagatagtggtggaacttcttcacaccaaacactatagacgtcgcttccttctgtatctgcgcgtaattgatttcactcttagctaag

SEQ ID NO: 862 - DNA, 494 bp, Plutella xylostella
accgtatgacggataccaccaaatatacgggtacgcataaagagagatttgacagatacaaccaaatatacgggaactcataaagagagatttgataaagacggtaaagggagaggtatagaaggtagatcggaccaaaaagaggacacagggtacgtgcaagggtttaaagataagaaatgatgtggagagaataacgtctggagagattaacgtacttgtctcgaagcagcaagttgtcgacggttccggcaaatagcaggacacagacttgtctctaagcagcaggttgtcgacggttccggcgaacagcaacacgcacgacaggtacacggtggaagtggtcaggatagcgcagatggttccgatggggatgctcttttgagcgtcagccaaatctcccgagcggtttgagccagccataataccagtaacagacgggaagaatattccaatcagcagcgtaaacgaagtagtgatgtcggcgtagatct

SEQ ID NO: 863 - DNA, 494 bp, Plutella xylostella
gacgccagtggtccagatgcaaatgctttcaatgagagcagggagatcagagaaactgttaatgatgcagccggttgtgagaataaatgtgatgatagcgatgataaggttgaagatctgtatgacccggtagaaggggctgtcccagttgtttttggcgaagatggaaatgccaacgaacgacaacactcggttgaggctttgtaatgtctcatccatgctgcgtagtagaacgaaatgaatggagaaccagattggaagtaagacctctagttgtaactggtactggtgggttgaaaggtggctaattttgtatcatcacttagacaaaaagaaacagaattttaatttatgtacctaggtaaatacgcttaagggtaagcgtccacttgccccttgatttatgatatcatcatcctcatcatcatcagccaataatcattcactgttaaaaaatagtttcctattaattgtatcaccacttagacaaaaaa

SEQ ID NO: 864 - DNA, 487 bp, Plutella xylostella
atcccgtgaagtggcagctgttgtattcttcgtcctagctgcaagatttgtacaatgactacaatagacactattcttgtcttaaacgtgaaatattgttagatcggaagagcacacgtctgaactccagtcacagcgatagatctcgtatgccgtcttctttcaggtacatattcaacatctttccactgtcagttgttaagatgctaccagcttctctttatacttaggtatgtttcttggttaccacctaacaaacaaaagctacgatcgcactgaacggagccgtgttctgggtcggagtggaatctgctccaatcaaggtttctagctaaataagtgtaataatatgcataaagtatttgaaatatgtacataaatcttcacattttcatcagtatttaccaaatgacatgctattctatgtagtgatttaatatatttttataataaacttttcttctaaactttaaaccccaaacaaaca

SEQ ID NO: 865 - DNA, 483 bp, Plutella xylostella
ttgaggtacagaacccaaacattctctggaatcacgttaaaaatacaatccaactaacgtaccgggggggacagctgggctgctcccgcgccgtaggaggttggaccccatcaccgttgttgaggccgccccctgctcttccgatcttctgtctggttgtggaagcggtgagacaagccggcagcacggagcagttgatgcgggcagagaagcactggcacagggtgcagttgtcgcgctgccaccgcgcgccctccggccagtagcggcccaggtctacacatcttggagcaggcgccggcgctgagcaggacatgggaggttattggggtgatacgtaaatatgataattgaagagtaaataaatacgataatcagacgctctgtcgcaaactgcgtaggtctccgaggatttggcggtatattggatgctctaaaatcagtttcagccaagagagcgttatcatcttctcccaaagggtc

SEQ ID NO: 866 - DNA, 476 bp, Plutella xylostella
tacctgcaaatggattggtgttacttagctacgtttaaaaccaggtgtccaatggaattcttctcaaaagtctatatttttttgtttcccacttgtaaatcaaacgaaaatatttcaaaaattattgctaaaatcaggcagccgtgtgaaatacctgcaaatggattcccaggtgcccaatgaaactcttctcaaaagtctatgtctaaagacgtgtgtacctactcatcacaaattattaacgaaaacattgaagaaacctatggatgcatcaatgaaaattaaggaaaggcagtatctagcacttcatagcatgtctacttcatagcatattaatactgttgcgcttcaaccattcttcttactgaagcacgtattttaaatgtttatgaataaaattataataattttacttactactgcgattttccgccgtttatataagaaaaagaaatgcaaaaattgtccaaaatgct

SEQ ID NO: 867 - DNA, 462 bp, Plutella xylostella
cagctgtgccgtatactggtgttaaacatttctctaccatgtcagtacttcagagcaatgcctaagcaagacccatgtgcgcctaagaaagaacctgcgaaagatccgtgcggccctaaaaaagacccatgcgcgcctaagaaagacccatgtgggcctaagaaagatgcacctaaagacccatgcgggcctaagaaggaagccccaaaagacccttgcaagaaagtgtgctctgatgttagagatgatgactgctgccccccttgtcccccttgcccaggggagaagggtaaaggggagggccccccgaagagcgccacggcgggcgctacagggcagattattgcagtgattggcgccgtagttgatgtccaattcgacaaggacctcccgccaattttgaatgctttagaagtacctggccgcacgccgcgcctaatcctcgaagtgtcccggtacctg

SEQ ID NO: 868 - DNA, 459 bp, Plutella xylostella
cgcgaagattcgaagtatcaaattatcctacgacattgacatagattatatggaccaatttagttcactctcaccggaacagataagtttgtggcactatacgtactttatttggacgaccaataaagttattcattttcctttttcggaagagttactatagcacaggtaacgcagtttgaggtcccagaaattatagtttctgaatgttataataagtagtgatggataataatttttttagtataatcgtaattattatactaactattacatcactagtatcatagagaaaaaaaaaacttaaaactaaaatggcagcaacattttattttgacttaaatatttttgaaaacagctgatggattgtatgttgcgacatttgttaatttacattagaaaacgataggaggcggtcaatgtactggcatgtcagtcacgattcatcatcgaaggttc

SEQ ID NO: 869 - DNA, 459 bp, Plutella xylostella
tcagcgcgggttaggaccgtatagtttgtaaaaaacaacaagaaccctttaagtaagcgtcctgacgtgacggtatcgtacgtatcgcaccaaacagattgtcataaataaatgtagaaacggcgtcggcaatggcgactccgaagtatacagatacctttattcgcccatgctttgatctaactaaaacttattagggaaacaaaaggtatacatgttatgtacctactcaactaatcattaaacagaatgtttaatttccagaccaacaagaccgcccatgctatgatctaactaaaacctcattaaacattgacaagaatctacaaaaaggcgtacaaactgaacacaaccctcagctatttcctgatcaagacctttgactggcacgatgacaacacactggctttattcaacaaactgtccaaaactgaccaagaaatattcacctttgacata

SEQ ID NO: 870 - DNA, 457 bp, Plutella xylostella
gttgtgggttgtgcatcgttacatcgttttacagtttttacacgaacaacttaggtacctactcatgataataatgctatgcattggtataataccttggtagataataattaataatgtaggtacgtatacctacccagtattatagcagtatgtagttagttgtgagttaatgagttgttgtccgtaggtttcatgacttgtgtaagtgtaaggactgtaggtactgtaagtacctatgtgtaagtacttacctacattatacctatcacctctaattgatattttttattgcgtaaatataaaaataagtgtaaaaaagatgcacttaatgctaaaagcattgtctgccggtcaacccacaggtggtattatctaggtacctatacatgtttatgctcgggcaaacaccatccgtatccatgctgagctgaaaacatcatagacaacgcagcaa

SEQ ID NO: 871 - DNA, 456 bp, Plutella xylostella
tgaaggcgaaggcgagggctacaaattcgaaggctacaattaaatcgcatttagacgaacgccgctaaagtattcttagtatgatcggactctgctctccgactttttctagcttgtggcaaatgtacctgaaataggattagtaggttaaattgatgaagcaacccgtgaattctcatcgtcgtaatgttaattttgtttctagtgttgttgctaaatcttgatctgtattaggcgttgaaattgggctatgaaatgcatacagtttgtcctagaaagttagtaaattgtaactgctgcgaaccgactgatatgacttggtgtgattgtttgttctattgattgtattaatgtggttaatactctctcttgtatctcattatagtgtaagtgcgacttgtctgtttgttgtaagttccagtgaaattgtgatattaataaagaatgttggttttt

SEQ ID NO: 872 - DNA, 454 bp, Plutella xylostella
gtaaaaataagtatgtcagctgttcgatatccatattacttacagattctgcctttattttgtgatttgcccatataaggtaaacgcggcgatctccgccacccaaaaatagtgaaggtgtcaccgtcaccttcaagaaatttcaatttactgacagtacgagtcgtggcggtaatgccaaaaatcgacctaccgtccttttttatttatttttgcctataactcataggtttttcatatattttatactagctgtacccgcgagcttcgcttcgccttaaaaagttttcccgcgggaattccgggataaaaagtagcctatgttctttctcagggtcaataagtacctacttaagtacattccatacttacttaagtgcttatatgaagaaaatctaatgtcgttaatataatttatcaaccgaagtccgaaacccttgttttcgatcttcaa

SEQ ID NO: 873 - DNA, 452 bp, Plutella xylostella
tcctgctgtcaatctgttcgttgctgacggacccgaaccccgatgatcctctggtgcccgagatcgctcacatgtacaagactgatcgggccaagtatgagtccacggcacgctcctggacacagaagtacgccatgggctagagcctggagggccaggtggtgaccatggatgtgccgaacggccagctggtgaccatggatgcgccgagccccagaaccgttatcacctaaataaccagccaaaagtatcaccccaccccgtgacgaagtgaatggacttttgaggccgtcgtgcccctgttgaactcgtatgaatgtactcttgccatgtcaagtccgttgggtctgggtagtctgttctacctgacgtttcgttatccattaagttaaatctctgtccgtatcatgatatgtatggctttccattgcatgctttgattgggtttgcag

SEQ ID NO: 874 - DNA, 451 bp, Plutella xylostella
gagtggcggacaggctggactatgatgtgcgggatcgactggaacaacggagctgacaataaacgtgataaatgtgaccgacgggacggtccgagtggcgaatagactggactacgacgtgcgggacacttaccatgtgatcattgaggctgctgataagggaatgccaagcttaactggaactacggagctgacaataaatgtgataaatgtcaacgataagaaaccttccttcactcctcctatacaaagagctgaggtatccgctgatgcagaagtgggcacattcgttcataacttggtggctgtggatccagacacgaacaacaatttagttgctgtggatccggacacgaccagtattgaagatctgaagtacgaacttgcgaccgacagacaaatcatagctgttgacaataatggaaaagaggtatcagacgagggtatattc

SEQ ID NO: 875 - DNA, 445 bp, Plutella xylostella
cgcttttggtaagtttaatttaatttaacatcactccaatctctacgcttaccgtagctagtgtttaataataactgctgcagaacaatgcgttattttgtctttctcgccttattcggggccgctcttggtaagtttaatttaatttcacatcactccactctccactcttaccgattcattggcagatatcacctcccattgcaacataatcttacagattactgctatcgataaccgtagttcgttgttgattgttttaatcgactttaaaaatgagactttgacctgcatgttgatcactgatctcacgtttggctgaatctactttgacgacgttttcttttaacacaattgtaatgactatcaacagcggtccccaagttcatttagctgaatctattttgatgacgttttatttaaacacaattgtaatgattatcaa

SEQ ID NO: 876 - DNA, 438 bp, Plutella xylostella
gaggtgaccgcctgtaaacgagagaaaatacgcttcctggaaacactaacgaaaataacggtaaatattcttgttgtagattcgctttattttagaagtagcaactgtaatggcaatgatttatatttctttctttgcagtccctaattccagatagcattataaactcaacttttcaaggtaaagattggaatctttattggatcaggaaagtatggaatacctactatagctgcattgtttgtttcagaaaactgaggacaaagtggggatacagcaaaaattggctgcagaactggtgacgaaggaggaaataatagacaatatgcaaaggcagatccgagagctatcaaagaacgtgaaactaaatttattatttcagcgaacataaagtgatgcagtacgaacaatacgtgagagatttacaagcaaacaaca

SEQ ID NO: 877 - DNA, 435 bp, Plutella xylostella
cctccgtggagagcagcagcattgaactgggagccgttgatgtcaaccttccttcattccaaatgaaggctgagcttctgtctaccaaattcgaccagttggacggcgatattgttgctttttccgtgaacaagcaggagaatctggccgtgctggccgtccagttctccaatgtcaccaccgacaccgtcggagtgttcgagttctaccccactggcaaggaaccctgagtattcaccctcaccggcgatgagatctaccctaccctcaccattaccacctacttccagttggactctactgttgacagctcagaggactcttctgaagaatcttcaacctcagctcctactgaggaagaatcttcgtcctctacttccgaagaatcttcttctactgaagaagagtctaaccgtgaacatgcaggagaatctg

SEQ ID NO: 878 - DNA, 428 bp, Plutella xylostella
ttcggttttacgattttgtgactttattcattggtacaatggttgatattaggttgaacttaaaacggtttgacagtactcgtaaacaaaatgcagacagatttttgctttgtttttgtgtgtgacacttcatcttaatcgtacattgtgaatctaagattaccgcagtagcgttccgaaacttcgtttttcgtaagctagagtgctcccttgataccgtttctttcgatttcggtttccgttgtaaaaagtagttttggtcggacggatttgtagcacatttaacggctagactgcacagttttggtcgcacggacttgtaccacatttaacggctagactgctgtcgtcgaaatataataggcccgtttggacagctccaaaatgtatgggatgacagctggtgtcaaacctatatcatgaaaatt

SEQ ID NO: 879 - DNA, 418 bp, Plutella xylostella
tccaaccacgccatgcaacgatattgtaacaccaactagatgacgattcaatgatattgtaacacgaactagattgagcgtctaacattaacatatattttttcaacttaaagtacggttgcatcttaatgatgggagtcctcagttaagtaaacctcttctatagcttgattaataagatttattattacaagctacattggaaacaagatgaagtgtcagcgcaaaagaaacgtctcgacaattaacacctaacttctgcttcttttgaattagttctgttagaagatttttgtcttcatttattggtacaatggtagtcaacttcatcaatggtagtcaagtcatcaggttgaacttaaaacggtttgacagtcattaacaaatgcggaccatcttgctcgtatattgttggatc

SEQ ID NO: 880 - DNA, 415 bp, Plutella xylostella
gtgtggccagttctttttgtgatttttgcagcaacgctctgtgtcagtgtgagtccgctcgcgccaagttcagcttcaccaacttcgacaacgacatcgcgttgctgcggctcaatgaccgcgtgcccatgtccgaggccatcaagccgatttgtctgccgcctgatgataagagtctctacgtcggagtcaaagccgtcgcctcaggctggggcacgctctccgaggagggcaaggtctcctgcacgctacaagagggtgagttacgttttgtgatggcatgtaggtgttttcgtcatggtgaaggactaggtggtcagcatactgactgaaagcactgcaagacgtgtcaggaactatacctgactctgggacacagttttcgtgcccataaaaatacaatgaactatattca

SEQ ID NO: 881 - DNA, 414 bp, Plutella xylostella
ggagcgccgcttcaccctgcaagtcacggaccgtagcggtttactggtttctgattgaaacatatacgtatggtgcgtttaacctgttgtgtgttggggtgtgctacaaactccttctgcttaatgtcgacggcgtgttgcactcgcggcaacacgaagtgccggcgtccactggagcccgcccggtgtttcaacactgtctccacttcttcggatgtgcggcagcaacctacgaataaggggaaatactgcaacccgtagctctggcctcgctgtctggccagtctggtgaagtatagatgaagagcgtggtggtgcttcgaggtagaagcattagaagatttttggctgatgctggtgtacgcagtgcagttggcgaagcagatagcactctagcagttcacagagaaggag

SEQ ID NO: 882 - DNA, 413 bp, Plutella xylostella
cgggctcgtgatgagagtagactgtgcagagactgagcgtgtctgtgactgtgccgagactgagcacgggaaagttgtgtcttgtgacgtcaccggttgtgacgtcacagtgagtgcagccacacagcagtgcaccgtgagtgaggacaacatgtgggctcacatatccatcgccttgcgagtgagtgcagccactactcactacccacacaacagtggaacagtgagtactaatattttgcaaaaaaatacgtataagtagttaggtatagtttgataaacgattgcgagagttttgtttttttagcaatgcacaatataataaatatagtggtgctggaaaccacactcttaaaactactctcgaccttcctcatccagccactaccaagtatttattttagagcgtacat

SEQ ID NO: 883 - DNA, 411 bp, Plutella xylostella
ttacaccgccgtgtcattcttcacaaggtggattgaagaaaatgtttggcccgatgaatatatttaagccactagctgtttctacgagttttgcttcgcccaataatgttttctagttataatgccgggataacaagtagccatataggttaatctagtgtgtcacctttttagatacaaaaaatctaatttacttactcgtttttgcgtgacagtagagtagcaattctatccatcaaataaactgtagtccatatcattagtaaaaagtattttatggtaattttaattaaaaaaatatattgctgaactatattgtaactgtaatacgttataaaagccaccgtagaagtagattttatgaaaagagaccgttacaattacaatacattacttaaaatataacaaaaa

SEQ ID NO: 884 - DNA, 410 bp, Plutella xylostella
atgttgcttcaccaatcatattcattggtctcaatggaatagcactggtgggaatggatttatttagtagcatagctgcaaagcatttgtctggtgaaaggcaccctaaaggtccgtcctaataatagtgtgacattcgtcgtttcggaaatacttccgcgtacgacattttgtgctatttattctcccttatacctacataattatttagacaatagaaagtcaactttttgtgctctaagatcatataagtgaatttatgactactgccgtgattgctttctgttgactatttcatgtcataattattgactaatgtttttatccgtgtcgttacagatacgtgctgaagtcgcacgccaccagcatagagacgatcctgcaccttacgccggaacaagagaaggaca

SEQ ID NO: 885 - DNA, 404 bp, Plutella xylostella
agctggttgtacaggttgtacttctgctaagtgatttaaatgcccaatgaaaagttctacccataaaactattctattctttctttgttctattaaacagctagcttttccgttttggagtaatatggtgctatctggaactttttattatttttgacgtactttacagtacaataagtagtatatgctaaaactattagttaggtaccgaatccatcaagaataaattcatcttcctcttcttccatatacctacttacgtctctgcaaatcattgagtatgacacccgagtctgcattgttctatgctgcaaaagtattaataataaaacctgttttgattgacttttgacttcagattcgtgctgaagacaccctgggggagccataccacatcaccacca

SEQ ID NO: 886 - DNA, 404 bp, Plutella xylostella
acttagccttaggtatgtcgatattacgatagggctgttgcaaaccctgagaaattgatcaatgagtttttgctctaataattcccacaattatatatgcttctataaaagctaatgatgtggagaacatagtatgcactattgtctcagtttccaatagagtctttccttccatacgtgcagcccaatcgtcagccataatgttgtcaaagttttcatattgaaattgtgtttcaattattataattatctattagatttattagtacctacattagaagataacattctatttatctgtgttctcaagcataaattgcgcatggcttcataattttaatttaagcgaatcctagacaaaataacatccggcgatctcccaccagcacattcacaagcacgac

SEQ ID NO: 887 - DNA, 403 bp, Plutella xylostella
atgttatattaaaaagtgttaagttgtcaaagataaattaaaagtttctgaaaaaagtgtttgtgttacatttggtcgttttgaaagaagtgcgtgataatatatgtacattgtagcataacatgctctaacattatagattttagtacacaatatatattcttggaattcgtaaatataggtaacaaaggggcagtatgtagctacagtaagaagtttattattataaaaatcattttctttgctcattgttccttagttgggtacctatattaatttattttaatgatcaaattactatatagggctgccactagcatttgtgatgtaaactaaactattgtgtgaaccaaataaaaagatgtcggatacgtctaccgacatcagagaattgtacgagtag

SEQ ID NO: 888 - DNA, 470 bp, Plutella xylostella
tggccggaaggtccaactccatttgtgattgagacccatttcgtgaatccatttcccgtaacatcttcaagactgcactgctcctcaagttgaagtcttccacattacgcctggacggtagaccttcagatactgcgatgaaacaaatgacgacgaacgccgcgtatttcaccgccatctttttttgaggcttttaacttaatcacctaaataactgtaacttgaatccaataaccgttacaccatcacttcactatcacgaaaaaccgtctgtaaatctgaaactattccgacagatttcacacatatcccgacactcagcccggactgtgcgaatataatgtgaattctccttttataaacattgagaaggatcatccacggacggaattcacaatgagaaagtacataagtacggtatgcaaaaaaaaaaattttttttaaaaacaacggaacaacgaaaaaaaacc

SEQ ID NO: 889 - DNA, 470 bp, Plutella xylostella
cctcctcctgcgagtcgcccatgaaggaggtggcggagtcgttcagctcgatgatgtgctcgcgcccgtccttgccaacgactagctccagggcgcagacttcgaggccgccgaatatctcgctcacctcgtcgatccacatcttgtagcggtcgttcatgccgatggcctcgagcatggccgagccctggttggtcttccagttgcccgagatggacttgcgcatgaaagccttgtagttgttgccgatcttctgtatgtgtatgtcgtacttggcgtcgatgtagggctccaccgtgctgtaggtgcccagcatggacaccacgcccgcgatgtcctgaaaatcggtgatagtatccactttcactttagccacgccactgtgcgcgtgccctatcttgatcaccaccgggaacttcggggccgacaccatgtcggtgtggttgtggtagtaggtctgctcgatgagc

SEQ ID NO: 890 - DNA, 464 bp, Plutella xylostella
attatgaccttcgaattttctagttaaatcgtactaagaggaaaagtcaactcatggtaagcatactgaacaaattaaacgaagttgtaatgatccattaactgtattcaccagagcaaaagtatctccaatattttacgaagtatctctacaacacctcataacaaacaatcgataaccaatgatgtttataaaaaaaacatttgtacaaaattttattcttaaggaagttgacactagttcttagccctagcaaagatccgactcttgaagatgttgtcaatgcgacagaagacattgtcggctgcctgtgcggcatccactcgatagtgaagccccttcctcatgtaatagtcaataagaggaactgtctgggagtggtaggtggccaagcgcttcttcagtgcatccacattgtcgtcagatctttttatgagaggttcacctgtgacatcatcagtcat

SEQ ID NO: 891 - DNA, 462 bp, Plutella xylostella
tttttttttgagtattcttgaaaatttattaaaaactttgtacaaaatctttacttatcctaacttaaacaaatgagaaatgacttcaatcaatgttggcacagtattttttacttaaatcaataacctatgtagacatacatcgagctacctaaattggtaaaatatattgaagttaggtaggtgcctatacagggtgactcgggagacgtatactctgatggagacggtacctacgcttaacgccaacgcgctcccctgtgtgttcgctcaaaaaccaaccaaggtatctattatctatctactatgttcgtaaacgccacgaacttccaaaactagctgtatgtgtttgtatcataatactggggtagatacttatattgaacgttattttgaactaccgatgataaccgatcgatgtcagattaagtgatgttgcttgaggattgtcgattgctaatg

SEQ ID NO: 892 - DNA, 461 bp, Plutella xylostella
actgtctattcaaacattgaaatttggttgatggaggtagtttgacaaggtacaaaagtgtatagctacttatgcagctgaccgtacgtgcggatacactattaaatttactagtaggtaaatacttaaagtacttatatgacaaaatactatgtaatataccgttatcacacttataaaatacgaagcataaataatgtttattcacagaaatgtacaaattgcaagcattcacattcacaatcctctttccgcagctttctattgattttagcaaatcaactttagttccttcagcttcaaaaatattttgtaatttactttcgtattttgttgtgtcaaaaagcatctagcttaaagtgtgttttttaacaaaactatctcagtaactttgaatttgatctaccatgaaagatgataactagtcgacacatctaaacatgacttataacgacacctgt

SEQ ID NO: 893 - DNA, 460 bp, Plutella xylostella
ttcaaggaaagatttcccggatattttatagtaagtacctaattcagtaggaaaacatagcttttaacgctgctttcataaagtgtccattgtaaaaacttttctcaactgtgtaggcgcactacataaaacttcaaagttgtattgtattccaacgcgctttattcaaaaggttcctttatactgggtttgtgtagggcttgcgaacaaatgtagttcctttttatgcatcagagaattctctaggtatgactaaaacagaatacgatcattcaataggctagccaggatctatgcggcattagattgtgtccgcaacttttgcttctaagagtttttctcaatcataaataattcttatgttaatcaatgattaatttgggccgtgtgtgtaaaaccaccaccccgcagctcgttccagtaaataggcctgtatctggtgactggctccttgaatgac

SEQ ID NO: 894 - DNA, 458 bp, Plutella xylostella
aaccggagggcccccttctttgtgtcctgcttgatcgggttcagcttctccgataggctgatctccatcttggcgttgctccatcggggaacttccaccaccatgttcacgagcttggcggaacggtctgcccatagtggaatgtcgtggagtggtgagatcggaccgcactcatccttgaagaaaacccggtagtctggtgaataggctgagcctctttcttctgccacaaacatgctgctgtaagactgaaactgcacttgtctctgcaatgagcaactgttgtttcctgtgagcctggctataggcaaaactcgaccgggggtgctcagctgacggaaaaccgacacacaccgcaagccacaacgtgaaaatgacatttcggccgttccgttctgtcacttttttaatactagtgaagtgaatcatacaaaaaaattaaaacaatttatcgatta

SEQ ID NO: 895 - DNA, 456 bp, Plutella xylostella
gccgttaagttttgtgccttgtgttgctgtaaaatatttaaataagtaagtaccacttaagtatccgcttcagctgtctttaccaaacgagtattattttcttagtcaattttgtcaagtcttcatatccgtatacattacaatccaacattatttatgtataactaattgtatcgatgtagtcgttaaattaatattgagtccattaacatgtcatggggaaaaatataaattgtcattttcacctgagatttccagttccaaagacctaaaacctaccagttctaacgttacagaaacacaatcgaaaatctctgaaaacatcatcacgtcatctagataaccgtatatttcaacatgaaagtatccttacgcaatgtccgaatcattaacatggctatgaaccagacgaataccaattagtatttggtggcgctgatttgtctgtctggtgag

SEQ ID NO: 896 - DNA, 456 bp, Plutella xylostella
gcctatgccaagaaaagatctttcagagaagtgctctgatcaaaatctgagatgtatgtacttaaattaaaattactttagtgacaacttccactggtaaaccaagcttattaattagagctctatattagatcagcaacattcatgggcatctcatcaatctgcgtagagtagtactgctcaatatctctcaagatcctgatgtcatctgacttgacaaagttgatggcaacacctttgcgaccaaatcttcctgaacgaccaattctgtggatgtacagctcacggttgttgggcaagtcgtagttgatgacgagggacacttgctggacgtcaatacctctagcccagacatcagtggtgatcagcacacggctttgtccagatcggaattccttcataatattatctctctccttctgcggcatgtctccgtgcatggagctgacagtgaag

SEQ ID NO: 897 - DNA, 451 bp, Plutella xylostella
tttggattcatcaaaacttatcaactaaatctatacctatacttacttaaaagttgctactttagtcatttgaaaaataaacagtcgcacaatatcacaagacgagccctgaatttgttaatcactaacacaagtttgatcgatcaatttataatagtttggacgaaaagtcattagatgctataagtttaaatcatcatcctcagattcatcatcgctagactcacccagcgctttatgaatctcatcctcgacttccatcgctgatatagacttgtcatctggcgccactttatggtacatcatcaagttagagtcatacttaccgcgacaacaaccaaactttttgaagacaaccgtcagcaggcagtacaaagaaatgcaactggcaataaacagagctatagacagaaatacgttcattttgtaatgccaattggcttcagtgatc

SEQ ID NO: 898 - DNA, 451 bp, Plutella xylostella
ttttacttttaagattgcacataacaaataaaatatgttaagcacaagttcgtttttcaattatcttcaaatgcgttatctaattagcatgattaaaagaataaactaaaacaacatcatcatttattgtttaaaataacacctaatcagcacataaataacaaccattaattaacgaaacaagctttaacttagtgatccttctcaacatcagtttccagatatttgttatactgttcttctgacattagattcttaatttcctcattatccgataggcttattttaaacaaccaaccctcatcatagcaggacgtgttgatgaggccaggtttgtcttctacattcttattcttctcagttacagtaccacttactggtgagtagacttcactagcagctttcacactttctagggctccgcattcatcaccagccttgaactgagcac

SEQ ID NO: 899 - DNA, 450 bp, Plutella xylostella
ttataaatattaaattataaatcgtagatgttttattggcatgcattacttaaatatttttcgaagaagaacattatttaaaccaaatataaaattttgtgacatttctcttgtttaaaatgcctttttgtgctctttaatccttatggcttttcagatatttctgtgctccaaataaataacaacattatgcttaatcgagaccgcacacgtataaatgtaaaaaataaataaatacaatcgatacttacaacacttacaagcttcacattgcgcaacaatcaaaagttcgtttacatctcactagatgtcactacaatcggccaatcacatgccgtcatcacttcacacactcgcctgattagctagcagcgccatctagtggtttttatgttggttattttacatggacttcatctgtgccatgagttcttccagcgacagctccga

SEQ ID NO: 900 - DNA, 449 bp, Plutella xylostella
acacgctacaggtacattaaattcattacaatttaacttttgcgcattgcaataattttggtgattcacattttcacattgcaaacatacatctatattattgtttcatcagttaattaagttcggagaaaggcggttaggcggtaatctgttaatcaaactctttggcacttcttaaaacatacagacgaattgagaacctcctcctaattttaaagtcggataaaaatgcatttctatattcaaatctatcgtctagaagtctagctcaaaaattaacaccaaagagttgcaacatctagtaatttcgtcaacgtgtgtagccgcccttagctccttagttcgcatagctatatcttccttctagaaggtgcttagttcttcttctcttccttcttgtcgtcctcggacgggggagtctcggtctgctgctgttggttgttgccttc

SEQ ID NO: 901 - DNA, 449 bp, Plutella xylostella
taaaatattcttttaataaaataaacatttacaaactgtgctataactttgacttatacctaaaataataaaccaaaattctctgtatacaaggctagacttacatagttctgttattgaaatcaacataatttcatcatctgatttcggatcactcttcgttcagctttataatactttatgcgattgataaaatacttaaaactaaatacattttcaagaacatttcacattatttttatctacactgtttagtgactactatcaaacattaggtgcaacccagttcagaaatttaatggccatttcaaaaccaaggaagcaggcagcatttgcagggaaagctctcagcatcaccggagtcacacctttgtagagagccagtggaccttccttctccatcagctgtttgaaaacatctctgattccattaggatacgtcccttctg

SEQ ID NO: 902 - DNA, 449 bp, Plutella xylostella
ctggcttttccctgactatccctgactttccagaaagtggacaccctgtttagagtcctgcaaacttcctgacacacaatcttactaaaatacaacattttggtgttcataatctcaactcgagttaaaaataaatacgtatcgtaatacacactttattgcgcgatcacttcaaacacagttccactgtcacattcgcactataggcacaacacttcataagaggccgcgtgttaaaccctgattacacctaccgagtagcgagacagtatcttcggccgaacctcgaccaatcaacggctagcaattgaccaagtagtcgaccgaggatactgtctcggctctactaggtgtaacgagggtattatctttggatggcgcgtcactgcaggctggctggcctgcgggcgtcgggctattgcagggagttgtcgggcagacggtgcgcg

SEQ ID NO: 903 - DNA, 449 bp, Plutella xylostella
cttttccctagcttattaagtatgaaatggaaagtaatgtaaactcaaattatcaggattagtatttaagagcaggagagaatatattaaccattattactattaagttttgaatattacaacagtaaggtaaaacaaatcaaattaagctcatcaaaaatagttttccttcaatttgaactgaaatttaatggttactttgatattattttatataattttaatgctacaaatttacacacaggcctacgacaacttcttagctttctgataaagagtatcaactactttgctcatatgatggatggtttccaggacagtctcataggttttctccaagggggattcatcaaaaactataagtacaccctctccttggtctaagatgccatttagcttcttgtccaaaatcatttgtgacagtttcttctccacctggatgacgggga

SEQ ID NO: 904 - DNA, 449 bp, Plutella xylostella
agtgcgccacggccgccagcgactcctgacggtgtgggctgctgatggcgatgaccactgacgcctcccgcgcgggaactatgccgagcctgtgatagatggcaatgccatgcacactgctccattttcctcttatttcttcacatattgatttcaaagccttcagtgccatcggctcgtaggcttcatattccaacttggtcacctgtttcccttcaaagttgtctcgagtagtgccaataaataaagaaactgccccgcagctgtcatcaatcacaaggttacttatttcttctacgcttaatttgtctactgttaacttcaagtggtccatattgactctagttttagattgaatgataaattattttatcctccactgagtggtgggattacagctatgctatctctttctctcacttctatgtcctgggtatcatcacagattt

SEQ ID NO: 905 - DNA, 438 bp, Plutella xylostella
ctccgccgacagcgccgagtccttctccccgatgcgccggtccgtgaacacgttcgtcttgtgcatcagcttcatctctgtgccgagggtttctttacgcttctgcacgcgacgcccggcatgccgcgctcgtgcttggacttctgccccagcaccttcatcttctctctgttgatgtgcacctcgaaaggattcaactttttcttgtgaacatcgccttttctcttgttgtgaactttgtcagcaagtcctgagtttcgtttatttttagctttcgccatgtttaacgaagccttatatttatgtaatttatttagtgaaagaggccacagttaattcaactttgttttagttattacacaaaacaccatttgtttttgacaaattttgaggttaagtattttgcatgtgttttgacgtttacacgcgtgtttttga

SEQ ID NO: 906 - DNA, 433 bp, Plutella xylostella
tcataaagtaattcctaactataataaataactaactaccgcttcaatttatacacctttacaatgtaataaaatgtcaaaaagtatgtaggtatatcgttactcaaaacatccacacactctctttacctataccacactaacaccaacaacaaatcagcattgttttcaatgttccctcatcatttaaccgacttcaaaaaaaggaggagtttctatcctaatgcccattttcaacatagtctgttagatcatgaacacccctgtaacattgtaaagtcatcaattatacgtcatatctatattaattttttaacagctatgtcaaaagtcagcaactaatccctggttatttgaaactggcgctaagtcttcaatacagccagcagtggtgatcgctaccgcttggactgttcagtgccgatggcctcgg

SEQ ID NO: 907 - DNA, 424 bp, Plutella xylostella
taatttatagcgtttattaaatacttttcacataaaggtaacatacaaaaaaaataaaccttaaattaaatatgtgtaggcacaaaaaatatttcataaaaaactgacgcgcctaatacaaaattacaattagataaaacatacaacacaattaaatttttacaatatcgtgcacttaatgtggctaaagataattttaacgttaaactataaaatctcattcaattcggatttgtacttgcagaaaaaaacattaggtcatgaacatcggcattgatcagaacatagaaactggcaaggcaagtaatgcgtgcgtacttttagtaacgagtcgtagtgatggggtactgtcgactcagtagggttgtttctttgtcagagaggggcggagcgcggtacgagtaactttgccgcgacggacgcg

SEQ ID NO: 908 - DNA, 305 bp, Plutella xylostella
actccgccagctcgcccgtgaacatggcgcggaagtacgggctgcatgctgacaggatcactctgtgtgcaaagagcttcctgttggccacattgagcaccacatcacgggcgaagcccagccccacacggagtcaatctttgacgattaaagggacactgcacacttaaaactgcccgttatggagcttattgtgaacacaatactctaaagttaaaggcactatttctatttggaaggcattgattatcaatcaggtgtttttgtgtttattctacgagcatcataccgatttgtccactatt

SEQ ID NO: 909 - DNA, 209 bp, Plutella xylostella
gcgcggtagaaaggagcagcggagtatgcgtagtaaggcgctaagagtagggcgcggcggggtaagcgtaacggtgcgccgggagccgtcggcctccagcagcgagtactggccggtcacctggtccccggcgcggctctccacctggctcttgaagtccccggtgagcgggtccgccacgccgtacgagaagctgctcgcgtaatccc

SEQ ID NO: 910 - DNA, 598 bp, Plutella xylostella
tccctacgaagtctacccctactacttcgtcaactccgatgtcatcgctaaggtccagggcatcaagatgcagcgtttcttcatccccaagtgggtcgccccttacttcagcattgttgaggagaacaacgttttcaacatcggcgccaactactccggctggttcaacaacgtaaaccaggaacagaagctgtcttacttcaccgaggacatcggccttaacacttactactactacttccacaccagcatgcctttctggatgaacggtgaggaattcggagtcctgaaggaacgcaggggagagatctacttcaacttctaccagcagctgttggcccgttactacttcgagcgtctgaccaacggacttggtgagatccccgagctgtcctggaggtggcccatcaagaccggctacgtgccccacatggtcaaccacaacctgcagccgttcgtgtccaggaacaactactaccagatccagaacgaagacaacatgcgcgacctcgaatacttggaatcctacgagaagcagttcctgcaatacctggaagctggcaaattcaaggcctacaacaaggaagtcgacttcagc

SEQ ID NO: 911 - DNA, 524 bp, Plutella xylostella
gcagctcgcgccactcctcgatggtctgcgccaggtccacttgacacaaggggaccttcacctcaccgatctggtcgtgcttcgagaaccgatcgaaatcgaagatcgcaaacactagcgtcttgttcatcgcatccgcatacggcacgttcttgaacacgaaggtttcgttgaataccggactgagggtcttccggtggaccttggtctcgaacttcttcttcttgtcgggcagcaggtagaccttcacgtaggggtcggaggtgccgcccatgtccagcgccggcagctcctcggcctggatcaccgtcaccgacaggctgttgctgttgaaatcgtactccagcttatattgcagtttgccaagtttctgttcctccttcttggcatcgccatcatcaggttcttcggcgttctccgtcagctcgtccatgtcaggctggaccttttccttgtaagcggagccgaggagctggaccgacttgaggtcgacgccgcccttgcccttcttgccgtccttggag

SEQ ID NO: 912 - DNA, 592 bp, Plutella xylostella
cttgtgtcgtttgtgtgacatgagtttataacataaacaaggtaattataacggagatcacaagactttaggtaacaaacaagcaacattgtgttaactgagtattataagttaaacatagcacacactcactggttttgtgattataacaaaatgataaacaatcaaatgacggtcgttcgtaatatattttatatgtacgtcttattatgataagaagagtggaatttacaaccatcgttttctcaactcttcacacattcaaagaataaaaaagtcaaaaacaataactaatctttcaaagaagttagactttcgtaaaaaatcaaaatagtaaaaacaacttatcctaataaatggacaactgtagaatgtagaagtcattgactctcttacagcctaactaagaacacagtaaagaataaataacaattgttttcttataactatcacataaagggcacttgctcagcaatggccgaagtttcatcgagattgtataatactcagggatacaaatataagttttagacttatcaatcaacaattagcacttctgttctatttacaacattttagaaagtttcttaaa

SEQ ID NO: 913 - DNA, 406 bp, Plutella xylostella
ccccgaccaatcaacagctagcaattgaccgagtgcactgtatctgccactctactcggtaggtgtaatcagggtattactctaacttaatttacttcgatatggaggtcttaggttggaacccgttgggtccggcggtgaacgtgacggtgtagtgtttgccgtcgggagccacgtaggagtactgccccgtcacggtcagggctgcgtcttccgactgagggttgtcgatcttgccctcctcttgtctcgaggtgccgtcgctggtctcgtaagcgaagctgtatccgtcgggctgcacgtcgctgtcgaagcgcaggatctgcacgtcctgcccgccctgcggcgcgcaggacgcacactagggccacgtatttaaacattttgttgggtaccgtcgtgagca

SEQ ID NO: 914 - DNA, 374 bp, Plutella xylostella
aacccgtcgcctagagactcagtaaccttagcagcagagttcgagatcccatgagtaacattcttcaacagcgcgcccacgctgccctcgtagatgagcccggacacgccctccgacacgtccgccacgaaccccagcgggttgcccaggaagtccaccgaccccaggatcttggctgcttgccattttagctcatccttgaaatgcttcaatatcatatcggcgaggtactgcggcgtctcgaaggcgtgtcttcgctggaagcacggccgcgtcgtcgccccacgccgcccacacgcacagcttcaggatcagtctctcctccaaccgtatagcgatgggtgcgagcgagacgacgagatggtcgaagaaca

SEQ ID NO: 915 - DNA, 463 bp, Plutella xylostella
cgcctgctgcgcgccctccgtcatgctgtccgcctcgtccaggatcactatcttgtggcgaccgggcgggagggtcaccttctgttgcgcgaacatcttgatcttgttacgcacgacgtcgataccgcggtcgttggatcttgcccacgcccggcgggcccgcgatgatcacgttgggcgcgttgcccgacttggcgaacaccgccagccgcgacaccgtgtcctcgttgcccacgatgtcgctgaacgtctgcggccggtacttctcgatccatggcaggtggactgtggattttgtgctcgtagttggttttagtggcttcggggcaggggtttcgtcgtccacctccattatggttacatcgtcgtcactcattttggaatatgaacaaggaaattatcaagaaataaaaagaaaagaaacaataaatccggtgaacttaacataaaaacgcgcgctatt

SEQ ID NO: 916 - DNA, 556 bp, Plutella xylostella
atgcggtcaaaggcattgtcaacatcatccagtgtgaacaaatcaaactccgacacattcctgtgtgcctggtacaagtcatacatgaacatctgacccattttgtaaaccgggagagtggcgtacactgggcagttcaaaccaagctttcctattgcatatggtaaagccccaagatgcatgggatctgaatgggatagaagcactgcatctatactgttaatgtgtcttttcaagtccttgataaagtcaatatcgaacttctcatcccatccacagtccagaaggatcttaaactcgtctatttgaagtacatagcacgggggagactcatcaataacaccagagaggcaggtcaacttgataatcgaagtcatttctgccggaacctgattttatttcgagaataagtagataaactataaggctttacacataatgctcagaagtgtaaataaatgattagatttcagtttctccctaatactgaaataagaaaataaactaaacgcgcgagcgcgaaacaaaataattctgttgccgttgttaaataaaa

SEQ ID NO: 917 - DNA, 579 bp, Plutella xylostella
agcttcatcgctgacgcacgtatgatactaactaactagatactttgaataaatttgtgttggggaatttaagatgattggaataaaagtgaggtgttacaaagacatcacccggtttaaaatacatgcgaggaatcctgtatctgtgagatggaatagcacaaacagtccggcattgaagacgctagaggaaatgcctgggttgtctaaattgccggttataggggctctacatcattttttaccggtagttgggtctattggacacatagaaaatttcttcaacctatacggacattttcacaaaaaatacggcagctttgtaaaaatggaaggaattttatcgcgaccacccatggttattatgtttgagcctgagcattatgatcaagtataccgagtagaagaagaaaatcccttgaggccaggatttgacactattgtctattacagagaagtgcttcagaaatccacgtttgacggggtttacggtttgaccactgcacaaggtgaaaagtggcgagattttcggaccaaagtgaatccagcgttactgaaattaaaactgttaaaggtata

SEQ ID NO: 918 - DNA, 510 bp, Plutella xylostella
acagccacgcgcggtactcgtccgacgtgaacactgatggcgacgaggttagacgacctctggaagagcgtagatccaaccgagaagacaacggctctggttcatcttgcaggacactgccggcgcgccgattactcaaacccaacctctgcccagtattcctgacgtcacgcggcaacgagttaaacttggagccaatatcccgtcccagagtgctactcctgtacccgctcagcccagaatagtacggggttcgagtcggggcagtcgcttctgtatccgacgaatagtccaggcttctattccgtcgcgctgtaccaaacttgctgctataagagggtaggccaagcccggctgtgccgtattgtcctagagtcgaactcaagccagctccagtcaatccactgccgactaatccagagctggttaatccggaaccaacaaggcttgagccggttaggccacttaatccggtggtggatagaccggagggtagcccagaaccggtca

SEQ ID NO: 919 - DNA, 449 bp, Plutella xylostella
acagtgaaaacaatagtgtaatcatagatagcacataaacatatcaatggagatgatcaaaattatgtaaacttttaaattatcaaataaacatggcttagcctcgatatagctctaccacaatttgtctcatcgtcaaacgggacaacacaggaataatggaatagttatcacaaatttattgttaaagcacttaactttaagctttgtagacctaccttaaaatacaacacaatgcaaacaatcaaaacctagatcaatatcacatacggatacaaatatgtcacgtaacgtccgcatcgcgcaaaaatcacgcagcatttttcaaaacgaaataaaatggctgctgaattttgtttactccggcggtaacaaggttgggcggcgggccgtgccactccaacctgtatttgtctagaaccctggttgcgagggaggcgagcattttc

SEQ ID NO: 920 - DNA, 449 bp, Plutella xylostella
tgaaggggagcttcttcagcatctgctggtctcctcgactggtctccactcgcgaaaacgttccacagttaattattttttggcagatacaaaagatacatcttattacaatttttatcaccatttctgataggctccataagagaaaccctcaactgtactgggtttccttcatcatgagagcacattcacctccgaatgcaaccattaccttttctacacaattaaagatacacacaagctaggtttccttagaagccagtgacagctttgatggccttctcttcgtcgtagggcgtcatttgcctgttggagtggaactccatggtgaaggaagcgagccccgagctgagggaccgcagcgccgacgagtagccaagcagctctgatagcggtgctaagcactctatcaccttgtcccccctccgcacgtgaacctgctgcaggtc

SEQ ID NO: 921 - DNA, 596 bp, Plutella xylostella
atccctggactcgggtagtttttaacaagggttacatctttagatatgacgtagagaccgtcggcgtcgattactagaggtttctttaacgttctgcaagtgttgaggatgttggcggtgagatggaccgtctctggagtcctgccgaggccgggcccgatgaccacgacgtctgccttgcgcagcacagcctcgatggcggggaaggtggagggggacagagtggggtgcacgatgaggtcggggctgtatgacttgatgaccggcgccacgctcgctgtcgtcagcacgtatactaggtctgcacccgcctttagagcggagattgcagcaaaatacggggcacccgtgtattcggaagatcctccgacgactactatcttgccagcatcacctttatgcaacccttcgagctttggaactacatttttagcaaaatattcaccaactggttcatttaaactatttatgtcgacacatttgttatttgcttcattcgtcacaacaaacgaggtgtaaaaactcagtaaaactaaggattttaacatattttttgtttataaacgctaaattttaatatgtgcatacgcagacaa

SEQ ID NO: 922 - DNA, 449 bp, Plutella xylostella
cgggcgacagcactgtggccgtcacgtccgtcgctggtgagggggcttcggcagcagtctgcagcgtcatcgctgggccgacagtcggcttttcctcatgaagcttggcgaagtagttggtcacttccaccgacacagagtaattagtgaacggcagtagatcaccaatctccacctctttatccaccgtgtcgataaacttacaaactgccttgttgcaagccgacccgtcgtcttcactcttcatacggtaatagacagtatattctgacgctgtcatgtcatattgcctgtccctacactgctcaggtttcccaacatcaggtaatcgcaatgctatgctgtttgcggaattcgatatcatttttggagtcaaatcgttagaccacgggtataagcaatgttttggagggtacggctgggttctaggatctaaagctgcgatttta

SEQ ID NO: 923 - DNA, 369 bp, Plutella xylostella
cgctacttaacctatatgtacaactatatcacaagctgatgagtaaataatcataatcgttggtttttggttcagttaattaacaagtaacattcagtagtatcctccgtggatgccggaagctccgtatccgtagccgagaccggcgtgagagtagccagaggagtaggcgaggggagcggcgatggccgagtgtccgtaggtcagaggtgtgttgtaggctccatgggtaccgtaggctccggcagcgtaggcgccagcgggagtggcgtgagcggtgtaagccacgggagcgacaacggcgtggccgacgggctccttgcgcacgacggcgttgaagccggtgtgggggttggcggcgtagtcgac

SEQ ID NO: 924 - DNA, 591 bp, Plutella xylostella
ctattagcgtctgtgtgtccaaaaacaacctcgaatggtgtaagacctgtagttgagtgtatggtttggttgtatgacatcactgcatacgtcattactgttgctgcgtcagtgattttgtgttcgtatttggctaggcgatatatttctaagatggttgaatgaaatcgctctattaaacccatagaggtcggattatgaggtgtccctatgtgtaaacggattttgtaaaagtctaaggtctcacgcataagtacattgttgaactctgatccaggatcagaactaatttttccgggtactccatatatagagaagtatttaataagcgctcttactacttcaggtgtggatttgttaggtatttcaaatgcttgaccaagtttgctgaaggcgtctattatagtaagaaatgattttccttctatggaaaacaggtcgataaagatttcctcaaaaggtcggttttgagtttgggtgagttgtaattcgggtttaaacggttttcggtcgtattttaattttttacaagcttcgcatgcattaatgatgcttgctaccgtttcattcatgttattccagaaatacgta

SEQ ID NO: 925 - DNA, 481 bp, Plutella xylostella
gtcgtgaagattatcagaatagaactttcgtcaaaaatggaatggaattttaccatttacaaataatgaaaaattatcatgtattgatatgggaaaccgtagacaatctgccagaactaacataggatctgttgtataaaagcagatgacaaaaaaaaagatcaattgacaagttttaccctgatatatttgcaggtttacccatgagaagtacaggataaaaagtaaaatatactttaagttctgatctgcatgagacatggacaaattaacaaacttttgcattaaaaaattgagtatgtacggatgaacacttgttgaaattcaatacctttgtttcgtcacactgctttcacacaacaggtcgttatgaagatgttattactcgctcacggctcgcctcacttgcagccggcctccttcgccgcatgattgttggactcttcagtcttatcaccgtcactgtagaactttggctcat

SEQ ID NO: 926 - DNA, 483 bp, Plutella xylostella
ttgcattacagtttcattcctcgttcattcaattggtcatcgtataaattggtagaatgcaaatgtacttatcccagatatttactctcgtgttaattttatcccggtataacgtgatgtttggtcgatccaccctaaatgagataaatttcagtaagtaagtatactttgtaagatatagcatgagtcctatgacagctgccaaatccatacatttatttataatttgttagttttccagggacaacgaacttaaattacctggcgtaaccaactgtcaatcaaacttcataaaactcacgttatattttacaaagcatagctcctcaaacaaaaaatgaatgaacgaagtcatccgccatttcactcaaagaatgaacgaaccacgccaaccctcacatcgcttgacacatctaaaagaatgaacgaaacactgaccctcaatcacttgacaatgaaggcgacgttgctatcattctcgag

SEQ ID NO: 927 - DNA, 494 bp, Plutella xylostella; identical to SEQ ID NO: 863

SEQ ID NO: 928 - DNA, 467 bp, Plutella xylostella
atgcacattgcgccaatgccacaaacccgattaaattaagtcgttgtacaaagggaaatctagctgcttttgcttttattaggtggttagttgcccggggtaagaagatgcggtgggccgtatgatggctggaaccctgactaattgccagaagagtgatgtgaccctgtgtttgaaggagcaagctctaaaggcagccgaacgactgaggaccgtcagagaactgcaactcacagaaaacatcgccatcatcaacaatgtacctaaagaagctaggagcctcgaaccccactctacagaactctctacagaattggaagccagaagggaacaggtcaatcagcgactatggaccactgctgcagagcttatggataactctgacgtagaatacagcttcgatgatggttctgaagacgaggaagagtccagggctattggagttgaagcccgcagcaagaagaaga

SEQ ID NO: 929 - DNA, 431 bp, Plutella xylostella
agcccgtggtgaatgctgtcatcgttgatgagcagatcgtagctgctgtttttgcgaattttattataaatggaagttatgaatattaaggtttatcctaatgtgttagtatgtttaggggaaagttgattcgcttggtatcacgaagcactaaaacatgggctggtgccaaattaatttctacagtcgagctgcaagcgaaacaaatgcaatgcataatgcaccaagatttaccttcagtaagattacccaaagaaacgtcgtggaaatgtcgaagaattcatacgagtttaagagcacacggtatcgaagaggtgaaagcgccaaattttcctgattcaataacttctggagatgttaagctaataaagaaggaaggtgacccggtggctgtagacgaggtggtgctcgagatagagacagacaagacg

SEQ ID NO: 930 - DNA, 407 bp, Plutella xylostella
ccagtaggctgttccaggcgaccaccgagatctacaccctatcctacactctttccctacacgacgctcttccgatctcttgtattgtcctcaaatcgccgcggttgctcagctcgccactatacgcttcattcacatacacataggtactgttcttggccggcaagttccctccactcggccttcgttcgttcagacctggggggctacttctgcccttcttaattcttatcttcgttcggtcagagccggggggctactccggcccttcttcatgtaaggatcggtggtgtctgcggaagccatggcgctcacatgttcacggtaggggcgggaggaggctcgcggtgcacagacgtacacgtctgaactccagtcacagcgatagatctcgtatgccgtcttct

SEQ ID NO: 931 - DNA, 598 bp, Plutella xylostella
gactcttgcagcaaaagattaagagatttctatcaaagacttttaaaagtagatgctgaattagagaatatgaagtttgaagaaaaaatacctgaaaataggtacaaaattcgtgaaaaacgttcgtctcgtgatatgataaagaggaacattagtgatacaaaaatatttgaaaaacccaatgatattaatagtgtaaaaatcaattctgagtacaaaatcgaagaaataggtgataatacgaataaagaaagacggaacatagaaataacaaataatgctacgcctccaaagactattggaaataagactgtgacagttgaagtattagataaggatgataatgagaaaacttccgcaaaaagtgttaaattgcacgacaaatcactgaaacatcataaaaagccattcaaacttgaagatgtttttagtaaaatgatcgataaatatccgaaaaatactccagagactttattagaaatagaggaagcagctgacactacagacggaaaaattgatttagatagtgtttcaaaaatacttgatgcgaaattaaaaatgaatgacgaaatgcagcaactgttattgaaatctaaaa

SEQ ID NO: 932 - DNA, 598 bp, Plutella xylostella
cctgcctgaggggacttcgctgaaggatgtgaaatggttcagtgtttggtgcgacgagttttcggtaaacttcggtgacgtgcgcatcccacgagacctggagtatcctcgacccgccaaggtcggagccctgtctggggtgcacggagtctccagcgacaacattgtggtggtcgacgctcagacgttgttgatacccaacttctcttacgatggcgaggcaccagatgcgaagttctgggtgggtcgcggggacaagccctcgccccagggcatccgcatcccggacgagaacggcaaggagactccgctgcgccggtacgaccggaagaccatcgtgctcactctgcccggggagctgacagtgttcgacatcggctacttcagcgtgtggtgtgaagccttcaccgtgaactttggccacgtggctctgcccagcaccaagctgagcaacgtgccgcccagtctgaagatgttgggggtttcgccgcagtcgaagctgaactgcgaggtgttgtatgaagacatggcgttcgaggtgcgctgggcggtggcgggcgacagcatcgtgttgcagcttgtggctaaactcgaggac

SEQ ID NO: 933 - DNA, 598 bp, Plutella xylostella
ctgcctgaggggacttcgctgaaggatgtgaaatggttcagtgtttggtgcgacgagttttcggtaaacttcggtgacgtgcgcatcccacgagacctggagtatcctcgacccgccaaggtcggagccctgtctggggtgcacggagtctccagcgacaacattgtggtggtcgacgctcagacgttgttgatacccaacttctcttacgatggagaggcaccagacgcgaagttctgggtgggccgcggcgacaagccctcgccccagggcatccgcatcccggacgagaacggcaaggagactccgctgcgccggtacgaccggaagaccatcgtgctcactctgcccggggagctgacagtgttcgacatcggctacttcagcgtgtggtgtgaagccttcaccgtgaactttggccacgtggctctgcccagcaccaagctgagcaacgtgccgcccagtctgaagatgttgggggtttcgccgcagtcgaagctgaactgcgaggtgttgtatgaagacatggcgttcgaggtgcgctgggcggtggcgggcgacagcatcgtgttgcagcttgtggctaaactcgaggacg

SEQ ID NO: 934 - DNA, 598 bp, Plutella xylostella
ctgattgtcgagacaagagcattacagtaattccagaaatagcagataaatcaacaaacatgtttgtagaagcaaatgatatggaattaaggccttcaaagttttctttttcctcttcttttaagtccattgctgatgttgaaactagtgtaaccgcattaaatgaaactaatatgcatgtcataactaatactaaaaatataaatgctccatctcattttaagctcaataaaagatcattattttcttctacacttcaagtactaagtaatgaggaaataaaaaatagaaaaattaaaagaaaagataaaaaaactagatgtaagccaaagaaagaaaaagtaggcttcaaaatggatgattccgaaaaaaatcaagatattaaaacttgtaactcaaaaccaatactaaatgaatcttttattacttcagataaagatataaacgccgtcccaatattggtagataaaataacatacatagaaagcagagatttactagtaacgactactcgagaacaaagttctaaaatagtaccaacagaagacatgggaaataaaagcatgaatgacagtgacaaaaatataacactttctat

SEQ ID NO: 935 - DNA, 598 bp, Plutella xylostella
taagatgttgtgtcattcataaaaaaggcaaggattggtgaaaaatgctaaaataaaatgaaagtaaactaaatatcttcaaatacaacttgatatggcaaaatattaaaccatactacttacataaacatagatatttttgcattacatatacttcacaatgtctgcgccaagcaagcaactcgtttcagaagacgattcaaacagcgagaatttcttcggaactgactcggcttcctcctcatcgtctgactcaggagatagcacaaataatttcgaatttagcgaaccttttgtattggaaattcatgacattaaggaaggcaatgcattaggctacacaaagtcttcagctgatgttaaaaacgggaatgtcaagagattaaaaaagaagaagaggaaaataaatgctactagtggttccaccaacactgcttcagatattgtaacaccgcagccttcaaacacagatacggctaacgaagagttttttgatgcgcatgaaagcttgcattcaatgccagaaaacaagcctaatacagttgacccgaaaaacgcacctgtggagatagacaacacacaaatgccaaaaactaaa

SEQ ID NO: 936 - DNA, 598 bp, Plutella xylostella
cgcgagcactcgttggccgggaactctttcacgatcgtcttcataaggtagtcagcggtgggccccgcgttgccggtctcgccccagccggccaggatcctctcatcatcagtgatggtcatctgcggcagcgccaggcacgccggacggatgaagtcggagaatataactgaggtatccagttccatgagcgcgatgtcgtagtacttctccttaggcgtgtacagcttgtgcttgtagtatctgaccacgttgtgcaggtccccctcgctggccatggacttggcgagcgcgccgagcagcgcgaagcggaccaggccataatctcgatgtgagacgacgtgagcggcggtcagtatgaacttgtcgctgatgagcgtgcctcccgccacccacttgatggagccctcgaagtccacggtgttgcggcagccgagaagcaccatatgcgggaactccttctccagcgcctccacgccgccggccaccttgttggtgaacgcggacatgacgcaggtgtcgcggcgccgccactgcccgccgctctccgacacctcgcacacgttgatgtagcgctggtattctacgcatttcagat

SEQ ID NO: 937 - DNA, 598 bp, Plutella xylostella
cgcgagcactcgttggccgggaactctttcacgatcgtcttcataaggtagtcagcggtgggccccgcgttgccggtctcgccccagccggccaggatcctctcatcatcagtgatggtcatctgcggcagcgccaggcacgccggacggatgaagtcggagaatataactgaggtatccagttccatgagcgcgatgtcgtagtacttctccttaggcgtgtacagcttgtgcttgtagtatctgaccacgttgtgcaggtccccctcgctggccatggacttggcgagcgcgccgagcagcgcgaagcggaccagaccataatccctatgcgagacgacgtgcgcggcggtcagtatgaacttgtcgctgatgagcgtgcctcccgccacccacttgatggagccctcgaagtccaccgtgttgcgacagccgagtagcaccatatgagggaactccttctccagcgcctccacgccgccggccaccttgttggtgaacgcggacatgacgcaggtgtcgcggcgccgccactgcccgccgctctccgacacctcgcacacgttgatgtagcgctggtattctacgcatttcagat

SEQ ID NO: 938 - DNA, 598 bp, Plutella xylostella
ttaagtaacggggaaggataataaatagatgatggtgagggtaagatttgtggtgaagtgtcttggatatcgaaccctggagtaggcaagcagctttgtgatccatagggggatctcgaggtgcgcaacatgtgaggctgtggccgcggcgtgagggtggactgcaaggtagacttggacgcgaaggctgacggcttccgcctgacagatggcgacaggaacatgcgcctttcattgacgagctgtgacatctggggcgtgactcctgacatagatctttgaggctgtgatgaaagtctgctctttttagggtacactttcactactcctttggggttggggcgaggagtgtagaacatggaagtagctcgtcgggagccggcgtgcggaggggatcgggagggcgatgcgtaggatctggtgacgggagctgacataggagccatagggggtgttgtagatggaggctgagttgggtaagccattatgcttggaattattgatacctctgtgggtaactactaatatctagatctgttgaaatactgctttaagcatttgtaaagttgaataatggaaataagtaggagtatggaaa

SEQ ID NO: 939 - DNA, 598 bp, Plutella xylostella
cccagaatacgctttcgagtatgaagaaaatcaggaagcagatagtgataatgaacccccggaagcgaaacgaaccaaacctccagtcgaaagtataccaacagaaaaagtcattattgcagaatcaactattaaagagccagttagaatgaaagaaccagagagaacagtatttacaacaaaagaaacagagcccacagagtcagctacgcaacctgaaacagaagcgacaaaagttgaaataaataatcgtaataacgaagaggctatggatattccaaagaaacctattcaaccaaggaaacctagtttcaagcctcttagaagaaaacttgaaagggaagatgaagagcgcgtagaaacaacagctgagacttggaatgagcatcgaatgagcccgatcataagttggtatcagaagcccgagcagactttagacaatttcgacgtttcgtttgaaacagtaccaacgaaacgtagaaacaccaaacctaagaggaaaaagactaagtctcctaaaactgaagcaagatacatgaatgaagatgaagaaaaaccttcttttaaagctgatgaagggatcaattgtgatgatttt

SEQ ID NO: 940 - DNA, 598 bp, Plutella xylostella
acgtcactatctccatcaggttgaatagggatatcattttacccaattcatcgcttgtgactaatttagatgagatcgatcgtaaagctgtgaaggaggacgcattaaatgtttccacggcaacagctaagtagaattcatatccgtttttggccagggctgataaaatagcgcccacaaaatgactgcagttggatattagaccaagaaccgagtcgtcccatttcaacatgcgactaaagaaacttattgatattaatgcacccagtgcatgaacgcacacgtaaaaagtattgaagaagctatacttaacagcgtcccactgaaagcgatatcttgtaaacaaatatcgtactgtaaactcgccataagacggcccataaataaaggcaatggccgtgaacactaggatggcttttgtgcgccggcgattgggtccctttttgaatgtcacttgaaaagtatcccttacatgttttacatcaaaaaatgtcttcagaaaattccacattccggttttttccacgtttttcttattgcccggtctttgaggatcctgtatatagaagtatccgtacactatactgaagaagtagag

SEQ ID NO: 941 - DNA, 598 bp, Plutella xylostella
ttggcctgcataccaatcatgtacaataattggagttgtttatgtaaacataaaggaaagtagtatagtatggtggatgtagtgtaaaatttaaatttttgtaccgtctttttaataaatctcagtttagaaataattgtcttttccgtgaaaggtgcaaacactgtaattataatttttatgatggttttaatttgacctttggccctttttataatgatcagtgtaaagttgaaagggaaatattgatacgttttatgcgaagtgagtatataatgagtatgtataaacgcgttgaaagagttatgcaactgcaaataaatttatgattgatgtacctaagatagcctttagcgtagaaatgtaaataattttatcgaaaattatagcttacccatactcatcttcatgaagcaaaattacgttgtctttagttttgtataattgtgacgtcaacattaaaatttagctaaatatttgttctttacaaatataatgtaggtactctaatattgtattgtaatactgttatatctttatatgatatatttctaagagtgctgtaaattttcatgtttttttaaataaacaacataaa

SEQ ID NO: 942 - DNA, 598 bp, Plutella xylostella
tgaaagcaggaaagtcacctaactttgtcgatttagaaaatgccatagttataaattgcaatttcaatgagggaattattgcttctaattaaaatatttttcgaaaacatacaatgcatagttaagtataaatgtaaagtttattgaggctaataattcatttacccttaaggtataatctctctctctatgttaagtataatagatgtaagtggataggtgtgattatgaattaagttaattttaagtcatgataatgtaatgaatttatcaagtgccatttttatataaaaaataaataattgactgatttgaaaagttggttcacgggtgataattaggtatataaaattaaaaaaataacgttaattaaaacggtgctataaaatttaaaaattaataaacagtaaatttaaggtataaaaggtgttaagttttttaacattaaactgcttgggtattcaaaaactagatttttatggaatggtgataatttacttctttatcactaattaagcgtagtaacctaagtagtacaagtaagttggtgaataatttgtttttttgcagaatatcaagcaaatgaaacattaagtaa

SEQ ID NO: 943 - DNA, 598 bp, Plutella xylostella
aaagtcagctaactttctcgatttagaaaatgttataagtaattataaagagattattgctttcaattaaaatatttatcgaaaacataaaatgcatacctaggtataaatctaaagtttattgaggctaataattaatttaccctaggtaaaggcataatctatctatatccatggataatagatgtaagtggataggtgccattatgtattaagttaattttaagtcatcataaaatgtaatgaatttattgagtgccattttattaaataattgaatgatttgaaaagttggttcacaggtgataaatacgtacaaaacgcaacggtgctataaaattcaaaaaataatacttaaacagtaagtttaagaatacgtggaatagctgttaaaaagttaacattaaactgcttgggtaggtattacaaaatacgttttttatggaatggtgaaaatttgcttctatcactatttaagcaagtaggaacctagtacaagtaagttggtgtataatttgttttttgcagaatatcaagcaaatgaaacattaagtaactaagtactggatgacttaattaggtatcttataattagata

SEQ ID NO: 944 - DNA, 598 bp, Plutella xylostella
tatgctgtgtgctaagtgggtaaaaaagtgtggttttccagtacctcctaaggatgtcttataagatggtgcttttagaaaaattttggacttaaagcttgtttctacatatatgatagtaatgcaatgtgtgaaataaaaagggcggtaatgacaaattgttaatgttcactaactacggcacacttcctataaacacggattacttattgatagtatctcaataaaaggtatgttaccagtgcacatttaatttagttcttgtcgtttgatccgctgtcggcctatatgtattaaaaaccggcatattaaaatatacgcctactcatgtgttgagtgcctagtgtgaagaaatagaatgatgtaactggtagcattgcagttgaatgcatctaccacggcaccgcacctacccacagcgaaaggtattcagtatcgcaagtcgtttgagcccaagaaaatgcaatattaatctatccaaagcaccttttcttgcgtgataaccatacggatacggaattaattgttaactaattgcaacctaaacatagatccgtagttgaaaaaaaggtgaatgtgttaagtgtaatataaaaaa

SEQ ID NO: 945 - DNA, 598 bp, Plutella xylostella
tacggaacctatgccagctaagaaagatagaatattaacagaagtaaataaatattttaatgagcttgaaattgaagccgacgatgaaagcatagaagcaatagtttcaattttatacacacaacaaaatcgactttttgctcaagaagtagatacggaactaaaggaagcattacaaaatatcggtatttccgaagagataattcctgaatacgtgcaaaaatttactgatatcgtcagaactttagcagatgagcctagtgccgatgtgactgtatcagaagatatcgaagacgaaggtactaataaaaagtatataagatgtaattatggaattacgcgcaacttaacagattgtttacagaaatacttgaacatgtatgcccaaagtgataaatttacgaaagatgcagtcacaaaacgtatggtcactgaatttgagaagctagaatatgatgagtccagtgtcgatgatgaaagaattacaaccatcacttttcagagaaaacttgatattgtacgggaagtatcggaatggctaagaactataccgctagaaacaacatttaatgcaccgaccaattataacagagcagtt

SEQ ID NO: 946 - DNA, 598 bp, Plutella xylostella
ctggcactctcaagtagggtaaacgtataaattaacttaagtaaaactcaataaattctgaaaaaatgaagctgtttacagtactcactttgtttgtgattggctgtgttttgtttgaggccgtgcaatgccttccaacatcggacggtcgaaaccaacaggaggtgcaggtgaagagaccacaagattaccctaagaaaggatgtcaatcgccaagtggacagggaagtggaggacagcagcgaagcacagatgaaacaggtccacatcaacaagaatgtaaaacgtcaacaggccagaacacggggcgtgatccgcgtgatgataatagttcacaagaaatgccatcatcagtggaaggccagaacacgcggggtaatgataataggccataagacacgccatctcaaaggaaggtaacaagtgaagtcttaagtgaattaacggtgcgttgccatgacatgccgggcaagtcgcaacagacatcttttatcattacttaactaagtttttttaaatcacttagggtgaattcgtccaaacatcacgttacacgagaataactataccggaattaaaattatacgcgagtaaatat

SEQ ID NO: 947 - DNA, 598 bp, Plutella xylostella
ctggcactctcaagtagggtaaacgtataaattaacttaagtaaaactcaataaattctgaaaaaatgaagctgtttacagtactcactttgtttgtgattggctgtgttttgtttgaggccgtgcaatgccttccaacatcggacggtcgaaaccaacaggaggtgcaggtgaagagaccacaagattaccctaagaaaggatgtcaatcgccaagtggacagggaagtggaggacagcagcgaagcacagatgaaacaggtccacatcaacaagaatgtaaaatttcaacaggccagaacacgggggggcgtgatgataatagttcacaagaaatgccatcatcagtggaaggccagaacacgcggggtaatgataataggccataagacacgccatctcaaaggaaggtaacaagtgaagtcttaagtgaattaacggtgcgttgccatgacatgccgggcaagtcgcaacagacatcttttatcattacttaactaagtttttttaaatcacttagggtgaattcgtccaaacatcacgttacacgagaataactataccggaattaaaattatacgcgagtaaatatctagga

SEQ ID NO: 948 - DNA, 598 bp, Plutella xylostella
ttgattaaaaattattgcaaataaactaaaaactataaaataaaataataattaaaaagaagaagtcagtttttttttaaattattattattatcccaccatcgtctttgctttcttcttattttccttttttctttctcttgctttaatttatataataaaaatatgtcaacccgaaagtaatagctcgccgtccgccgtgtttgccggttcggaatgttatgagcgttcgccgagcatgtggatggctgtttgtgttcggtgattgtggttggtgtttgtgactttgtttgctgtttgccgtgtttgtgacaaacaacaagcgtgtggatggggctttacactttattcatcttatttctttagtgaaatctttaaaaaaaacctcataataatataatgtggtaacgtaaaattgagcggtagtcatagtcgtgtctactaatgaaacctacatattttccatattctaattggtgttatctactgtgtcgatgtcgtctaaaatgtaaatcatatccaaatgttacttggtgtcgtgaaatagctaagggctgatttttcaatagtcagataaatgttttctgaggcataaaat

SEQ ID NO: 949 - DNA, 597 bp, Plutella xylostella
ctcccagtgaactgatgtgtgataatatggaattgacaggtaacaccattcaagagctcagtggattatggccagagttgaaggatatttcacttaaatttcaaaagctagatgaacaacttttagatgtaaaagattccctgatatcttggattaaagacaaaaagtcatcaaagtggtcagaaggtcttcgtcaattgcagctaaggatgaatggaaccaatcattcagatctgagctgcagcccatacgaagccatgtttggaaggaaactgaatgttgacaatggggaaaagaaatctacagtagaagcagtatgttctcagaaagatgactttaagaagaacattgaatgtaataataataataatttaatgtaagcttaaataattattcattgctataacttaaaatattgtaggtagatattgaatattgtagaccttatggagcaaattgtgataatttatccaactttgtcagcaaaatgatctcaattataataaaatttatttttagtatgttacattgaagaagacataataatttagtttactattaattaagtacctaatgtgaaaatatgtcaaagatttt

SEQ ID NO: 950 - DNA, 597 bp, Plutella xylostella
taatttaaatgccgtaacagaaatgaacaaaaagtttcaagagcaattggaagatgtagagcagacagagaaacaactagaggacaagatgaagcagctagaggataaggaaagggaaggcctggaattgttgaaggaagccgattgtatgtggaactgcatggagtcagcttaccagcagaaactgaaagagagcgaggataaacagagtcagttgatagatgaggttcataaaattgaaaaaacaatatccaaatggcgcagaggatacagagatttagaattacaaatgaaaaaagttggcaaggttgaaaaagaaattgaagaaaaaaaactaaaaagagaaaatgatataaactgtcttaatctcgaaatagaaaatctcaaaaagcaaataaaaaaagatgatacagctatagaagcatcaaaaaaggcatttgaaagcaaaaagaaggcttgtgatgaaaaagtatcaacgtttactaaaaaaactgcagctttagaaaaagaattagctgaggaaataaggaatagaaaacaagctgatattgaaggccagaaagaaataaaagcagcacgagatgaacttaataattt

SEQ ID NO: 951 - DNA, 597 bp, Plutella xylostella
atcaagatgaataccgaacctaatgtgtgaaacctaaataaaaacaccgtaaaaatgcagtttacattattttttctccgtgaataaaacaaaacttaatggacccacaaaagaaattccaacaagaagccaaatactatgtttaaaaaagaaataatattctttacctaaacggcgaacttacaaacaggacacaaacaaaacaattcattaccaaactaatattaagagacgctgcctctcaccttgatggacccgcattcggcttcgaacaatcaggacccgagcgtaaggaatcagaaccaatcattacttctgcggcggataataaagatggtaacggcgctgatgtttgattaaaaacttaaaccaattccatagtacactagcaccaaatccacattagtacttaatataaatttaaaaaatacaaaatcatttacactaaaaatggtgactttatcgaagttaacgaataaactgacaatgaaaagatctcttcacaagtcaaaattaaaagaagctgtgaaacaagcaatgctagctcagagcgatattccaaaaaagactagtgggttggattttaccaatttcaaa

SEQ ID NO: 952 - DNA, 597 bp, Plutella xylostella
atacggcgaccaccgagatctacacatagaggcacactctttccctacacgacgctcttccgatctgttccgagagaggggttatgagcgtgtccattagtacgcttataaaggtcttcatcctggtctcgatggctctgtgccggagacacacccttgtcagtgccgtgcctatgtccttggtcgctcctcgagcattcgtagcggcgtcggctatcttctggaaagcgtccagaaacgtcgcgatcgccacaagcgccgattttaacgccgaatgtagttttgtcgctttcgatatgaactcttcccatatcggtgcactgttcttcatatctgagacgatctgctggtacaggctccatagcggcgagcaatccttctcggttgttccctccattgtcacagaaacaccagaaaacaataaacacaagatcaaacactatcgcgggtcacgctcgcttcggtacgccacaaatgttgcattttcgatgccaaattgtttcgcgattaccttacatttcactgcacgtttaattttgaatcactaaaacgataaaaagcacgatttatctacaaatcaatatttataaacagatc

SEQ ID NO: 953 - DNA, 597 bp, Plutella xylostella
tattcaaggaatttatagccaatattacaagatgatttgtcccgaaggacatcatattcagaatgaagttcatataaaggaagaagatgatgtagctgagccaacgctacaaacacaaaataaaaaacagcctataaatggcgatgttcccacaggaagtactgaactcgctagcttcagaggtcctaagacttggaagaagtccataacaaacttcttcaagaatccgtctcgttccagatcaaatgacggggatcgtcctaccggcagcaaggaaacatatgaagaaaaagacatgactccagaacaaaaatggcagtcgcttggaaagatatttcgacgccaaagtttcgccgatcacaacctaggggagagttcatcacatcaaagcaaacgcgtcgcagttagaaaagtcctatcatcctattttggaaaaaaaccgaagtcgatccctcaagctcagctgcctgaaaatccttgatagattatccatatcttgtagtagaatatttagttattatctagagtctagctagacctaccagatttatacttcttctacaaaataaataaatagaaatgcctttaaaaacaaaa

SEQ ID NO: 954 - DNA, 596 bp, Plutella xylostella
aactatatgccattaaaacctagattaaaaggcagaaatgaattgttcgataaaaaagaaaaacgggatccagtacctcttggagagtctcaagaaatagttagcatttgtaaatggtcttcaaattcaaaggattacagtgatcgaagagataataaagtcaagaaactctgtcgaaaaaggccaaaaaaagcgtgaaactatatatgctgcttatgttaacactaaacattgtgcttataatccaaagaagataaggaaagggaaagtggtagttaaatcaaagcgaaaagtacccacgacagcgacgtcaaatgaaccttcagttcagattgcaaaaaatcaacaaatccctaatgcagttagtaaactttcaataaatacgatgagaaaccagaagttggcagattttatgaagttagattgtctatcaacaatgccttggcgaaggaaaaaggaagaaacggtacagatattaagaattatcaaggatggcaacgcagagagatcgaaagctttagaaaaattaagagctgagagagaagcggctttgaaaagaacaatcatgggtaacaggactaaaaatattacaaaat

SEQ ID NO: 955 - DNA, 596 bp, Plutella xylostella
cagtacagtggcatcatcgctagaacctacagaaaaaaacctcagcgtcattccactcaagacacccttgccagttgaaaatgcaccaccaacccttatagaaaaccaaaagaatacggttaaattcagagaagcgcacaaaagaaagatgaaggaaatgcacgaggcaaaacttgacggatttaaacacaagttgaagaataaagtgaaaagacaagctaatagatcatggtcagggtataaaaattatggtaaccccccaccctatttagtttacaataagaaaatcggtgcatactatccttactacaagtttcctattgagaacaatgtccggcgaagtggcgctaggaatacatacagtaccatctctgggagcgcgcgaggcagttccaggaactatgtcggtagttagtcattgttatttacctcataagctatatttaaaaaaaaaatggtgtaagcctgccttggttcggcaagataattataatgtgatggtaaataactatgttgaaaacctccacttgtgttcattaataaaaatttgtatcaaaggtacagtcagctgcataaatttttattttggcaataaa

SEQ ID NO: 956 - DNA, 596 bp, Plutella xylostella
ttagttgttgaagcgtagactgtaaacatcttattgttaaaaaagataattctaagctgaggttctacgatttaaaaaggaatggtaaagaatgcaaatgtgaagagaataagcggttaacttttttaagaataaaataaatgtacaaatatattttttactggctggttttttactaagtaggtattagttcatttttattttgttacgactagtcaatacttttttttaaacgtagttagtagttttactttttgttaactaaaataactttcctgaagtaacaacgcaccctatttattgatgtagtgatattttcatccatttaaatctaattattgtatgtaaacttatcaatttaagtctaaatttaatgttttttaggctttttaaatatattatacacgacactaaacattaagacgacaacttcaactacggaaatcaatgaaacattgagtgtaatttattacattcatacaaaaaatcatcaaaagtaagttgtaattactaaagctcattctgatattttagtatgtttcatcctactgtactgtactatactgcacttatatcaatttaactaacactttcta

SEQ ID NO: 957 - DNA, 596 bp, Plutella xylostella
cggcgtcacccgtgtgcggcaagttcatataaaatgtacggaaattacaggaaatatgccagtggcggcgttttgtggccggtgacccttacatctttgtctaaagcttcacttccgccagtactgcgcgaacttgtggaactgttccaccagcaccgccatgacggccgtcaccgacatgtcgatcaggttctgcaggtagtgcaccgcctcctcgtcgcccaggtccagacgcagtttgtcctgcaccttcttgacggccttgtccggctcgagcgcgatgtccggcaccgacgcgtccaccatcagggagaataagttgaggaccaggttcgcgtgtcgtctcaaatgcagcagcgccgtgtagcacagcttcctgaactcctggtacggctcttgcgcgggcccgcccatgccctccaccatctcgcggctcagcttcatgggcggagggagaggcttggggtcccgccccaggatgtagccgaagtctatgtggaatagcgcgccttgttttgtgagaagtaagttgtcgaggtgccggtcgcctacgccaagtaaataagtgatgacgcaatacccggcgcaactcctta

SEQ ID NO: 958 - DNA, 596 bp, Plutella xylostella
gaggacctccttgccacgccaatcaaaaagcattgcgataaaacttctcaaggtcatatctaaaggaaaggcacctgtaaagactgtacttccaaggaccggaaaggcaaggactcagaagccaaggaggatgaaaagagtagtggtgaaaaacaaaaaacgatccacactcaataaagtacaaaaaagaagtatggcgccggcgtatagtcgttcaagatattctaactattcattcaattcacttgatgacatgtggtcctgctgtagttgaatgcatggctaatgtatttttagttaatttatttgttatagatgctctttattttttatattttcgtgattctcttctgtttattattttaataaaatgattgatttttgaattaaaacaaaaattattctttataaaaagtaaattacatgataaatataaaaatatcgcgttaattgacgagattatggagccatacataagtaccgctcagaacacattaagaaacagtttaccttatcatgatcaaatttatgtgagtaactgtaacttcacggatacagctgcaaaaatattacagctagaagctgaaggtagatat

SEQ ID NO: 959 - DNA, 596 bp, Plutella xylostella
caccagcgaggccgatttgaagaagattaagtaaatgaggaatgagaggattgggaggagaaggcaggattgccagcggagtattatagtcattatactatgcattttttttaggtctcttaaatgtattaatgttaagtccggaaacatttcatattatattgaattttttcttacttttattgaataagttcagctgtattaattgaggtatggttttcattgtttgtagcaaagtagtagaattgattgtttaggtatttttttcaattcaagcaggtattttagtttaaaacttagtatgaaatggatataattatttggattattataattagtattcgtagctaattaatataaagtaacgtaattatttttgttttagataaggagttatttttttatataatttattgttattactgtatattttgggttttcaacagaaagtagataacatacttttatataccagttttaattgtatatttttttattcataaagatgttaatcacttacacattacataaatggtttattaagatcacaatagtatcaaattttcatttatctacgtataaattattaacagaat

SEQ ID NO: 960 - DNA, 596 bp, Plutella xylostella
tatagatgggcttgtttctgaaaaggtattcaaagttctgttgatctacggtaaaaaatatacaatagctgatggtaaggaacatcaaaaatttacagctatcaaaatatgtattttttgcttggtttttagatttaattgtttgaaattttgaaacgtctatgtaatatctgaatgcatattcgtaataatgatggaactagagacatttgatttaaaattactttgtttttgtatttgttttgttcgtattttgttaatctaagggtgggttgcatcaacatctcggttatcgtaatagttaaggttaaacttagcaatgacagagtcgttacagttaatattttactgtatcgtgttgcaccatcaaatcgtcggtcattgttaatgttattagggttgctattcgtttgagacataattatccccaaagttattgtgggaaacgtttttatgtaaggcaataccaaatctagctgtcggactgaagccgtcacagagtacattgtagccgtcattctctgtcaaagcactcaaagtcaacatgtcataggaactaagtctgttgttcctccaaatattgaccaaaagattat

SEQ ID NO: 961 - DNA, 595 bp, Plutella xylostella
ttaatgacagtgacttttctaatttcaaaatcaaaacaaaagcagctgtaaaataaactctagctggttttgaaaactctgttttggtgagtttttcccaaaaaaataaagaaatgtagattcaaataacataaaatcatgccaacatagcttagatttaataattccaaaattaacaagtgatacaaaatgggggctaaaaaaaagaagaagggaaagaagaagaagaaggggaagaaacctgcagccagagtcctgaaactaccatcggaaccgataccacaacctccattcatgggagttggtaatgcagtcatattcttgtctcgaccttcgaaactaaaagaaataatggagaagaccccattacatatatcagtatggaaccgagatcaagacatgaattgtataggatttgtggatgttgaatggcataaatctttcttggagtgtctagagcgatcagaagaactgaacccagcagatatggatgcagcccagtacagaaacactacgccgccagaaattatcaccaacacagttgaaatggtcaaaagattaagatgcgaagagaaccttctaccttcaggtgaaa

SEQ ID NO: 962 - DNA, 595 bp, Plutella xylostella
tttcgaaatggtgcgttcgtaaatccagaaacatcataatgttttgatgatgaaatctatctcaaagcagacatttcaaatttatgtttctatcattatttcaataggtatacctatatttaagtataatgttgagggttatggttgaaattacacgtttgaatatgaatataaatcatgcccaacatatttaaagaatgcattgttcggttgttccacaaacgcactagtggtacttagtgaccgaaatataattggcacaatgcacaaatcagccctcttatcaccctacctatgctacatagtaaattacacatcggggcagaaggtacctggctggatataaccgtgacagccacgtacgcatataaaaaaaagaaaatatttcccaatctgcataacttgacctcctttcactcgcaaaaagattagattgcgcaatgtccaagaatgaggtgataatttgctaaccgacctgcatgctgtcacctactaagtagatgaagtgattcactgactccatcaccaccgaagcaccggaactaggaaatcgattcgcattcaaacaagtttactgatgtaatcataataatgt

SEQ ID NO: 963 - DNA, 595 bp, Plutella xylostella
taggccacggctacagatggaaacaaatttagattgggtaaaaacctatttacaatataaacctaaacctctaccaccaccaccaaagaaaacaaagaaagagatagaggaagataaagctttaaaagtattacatgataaacttcaagaaaatgcagataaattgaatgcaataaaaaaccgaaataaagataaagaggaaattaaagcagaggaagattttaaattatatgaatatgacggccacgagccccataaaggcagaccaccgactgcagaaattctatctcgagggaaacccacaacgaacctacaaactatttatacatatttaacggtagtggataactctggtagtgaagcagaactgtttgtagatccgaacaaacgtaggaaaaagaaaggtaataaaaagaagtcgtcgggagaagagtttataataatgtttgcagctgaggataaaaaggaagataagaaggagagtagcagtgaaacagatacgggtctccaaaaagataaacaaacgaacacgaagaaaaagaggcttaagaggatcaagaagaagaaagaggctcgaaaaaaactaacaacacga

SEQ ID NO: 964 - DNA, 595 bp, Plutella xylostella
atagccgaagatatacctggaccagagagttgtgtatagaactatagaaatgtatatttaattgaaaccccttagaacgtctggtgttcagggataactctgatttaattgtatctgtgctttgtttgtttagtaaaattaattctgcgtatagtaataataaaccgaaatcaattgtgtaattataattttaataaagataggagcgtcaggtgatcttgcattataattatgtacctcagaggtagacaataataagtacttttaattttatgatatcgcgaaaatgagctttgtcacataagtgtaaaaaggggatctccttaaaaaaagtggacataactaccatcactgtttgtgtttatcaagttattctgtacctacttcagtgtataataatcaatagagataatcatatctaagtatttgtcattaaacagttcttgatcagagttattcctattctcctccaaatggtaggaaattagattttttgtaaatattttactgactgtgacattgtgataaatctttactgtaaatataaaaagacaaaagaagtccatttcaaaaggaaataaaaggaaaaacagaa

SEQ ID NO: 965 - DNA, 594 bp, Plutella xylostella
gcggggacacctcatagccgaagatatacctggaccagagagttgtgtatagaactatagaaatgtatatttaattgaaaccccttagaacgtctggtgttcagggataactctgatttaattgtatctgtgctttgtttgtttaataaaatgaatcctgcgtatggtaataataaactaaaatcaattgtgtaatgataattttaataaagatacgagcgtgagatgatcttgcgttataattatgtacctcagaggtagacaataataagtacttttaattttatgatatcgcgaaaatgagctttgtcacataagtgtaaaaaagggatctctcaaaaagtggacataactaacattacaatctgtgtttatcagtgtataatcaatcaatagagataatcatatttaaatatttgtcattaaatcaacagttcttgatcagagttatccctattctcctccaaatggtaggaaattagattttttgtaaatattttactgactgtgacattgtgataaatctttactgtaaatataaaaagacaaaagaagtccatttcaaaaggaaataaaaggaaaaacagaagtgaa

SEQ ID NO: 966 - DNA, 593 bp, Plutella xylostella
ttttatcttcgctgaacccaagacatcagattcgacatcgttgacttgcatgacagcattattactttcatcggcagaaataacaccatcaatacaaacagcatcctttcctgtttccatattatcaagtaaccccaaatcagatttttctttatctaggtacagagcacacttatctaagtcatggcaaaccttatcgaccatactactgagacaagctattatatcggcatcaacctcatagtcatttatatctgcctggtctgctttatcgatgttcgacatcacatatttatcgaaactgtcgctatcagaactagattcattgatcttgcgggctaatgttgggctcaaaatcagatcaccgtttttattttctttaaagtgctgtgaaaagaaatcctccatatcttctatattgtaagagggtttataattttctttatcacccatgtctttccgaatggtagtatttttggacgcagacttgtatttcgtagttttacgtcgcgaactcacatagtttacgggtgtctctgcaatattatctgtcatatttgagtcatcagaagtagatattatctttgctttat

SEQ ID NO: 967 - DNA, 590 bp, Plutella xylostella
tcaaaagcccatccatcagcaataaatccatcactagaggtagtaaagataaaattgaaaaaagagtagcgaattctaaatcaaatatgaggaaagctagagggagtacagaaaaagtaataaaaaagagtgtgaaaatggataaagatgctattaggaaggctcggaaagattgtgctagtacatcatcagatatcataatatcagtaagcagacgagaagtggtcccagaaccaaaaaaaggaaaaggttgtaaatgacagaagaaaaattaagaactgtcaactattagtctggtttatgaaaaagtaacaaattaataaaatatttcaacaaaatggcaaattccaacaaacatgctaaagaatgcacatcaaaacaaatagagagtgtggaaattgtaaagaatgctaaaggtactgaagatgttttgacccggcagctaggagatattaacattttacggaaacaacatcacgttataaaacgatacaaaaatcgtgaagaaactgttgttttgaaggtacaaagtactgacatgatttatgaaccaaacaggacgaagtaagaataaaatgaaacattttata

SEQ ID NO: 968 - DNA, 590 bp, Plutella xylostella
ccatgtggtattggagtcccaaagattaaaatattatttctcaagaccgaaggcaacgtggatatttcaacatttagtgttaattttggcaatgaaaaaaatgtatcggttgaatttgtggaagctgaggcaagtcaagatggcggtgcattttttacaatagtgcgtgtaaaaattttagtttcgtgtgaaaccatacactctgcacttatttatttatgtttttacaatgaaaatggagctgaatgtgatgttgaacttagtttcaatgtaacaaactgtgcaattaccttacacaacagcggtcttataagttcagaacaaaccccgtatcctttctatccgactgttgaacataatgacttgtaccagtatatggaagactgtgttgagtttcttgaagaatggttgtttcaagaaggctttaaaaaggaattgtatccagaaatcccaaatacttttcatattacttcaaataatctatcaagttctttagcagtttcatcatcgccgaaaaatataaaggtcacatttatgaactttttgaggcgaatcgtaggtcccttgataaatgatataaaaaaagaaaa

SEQ ID NO: 969 - DNA, 589 bp, Plutella xylostella
tatctgtttgtgctaggtctaacgttattcaaataagtttcgtaagccaaaactaacgcacgggttaacctttaacaaaacgcaactcaattgtttgaccgtattctaatacaatccacttgcacatactcataccggcttaaacattgttcgtaatgctattcatatttactcatcacacattacataaatggagtcaataaacaacaagactcttgaggtcaaggctttcgtttcaataaacctactgagcaaccgggattcccgcttcgtttgcacatgcaatcatcgaaccagctaattgtgcaagaaggatgttaacaaaagacgatcggatagtgaaatggctagtaatgctggcaatggacctgaaagacctgggtttgaaacccgccgggagcaaattctggcaattccacagacaaaaattggaccttctcgatatttccatatacccgatagatggaaataagcagaactttactaaactagcaaaaagtgaagcaatgcacctttgcagcgagtgaatgaatctttacctaataggcgttttcttttaaaattatgtaggtatttaaattaacaaaac

SEQ ID NO: 970 - DNA, 587 bp, Plutella xylostella
tacgtgaaacctgtggaggtaactcaaacttatcagcccacagtacaacaacatgaggttaaacaccatataagtcaaccaatccaatatgaatcggtacaacaaaactacaacacagtaaatctacaagactattcgtacagtcagccagaaatacagagggagtcttttaagtctggtatcaaatattcattagcaagtgacgtgtctcatcaaataattaatcatggaattgtaaacaatcaatataacgccaaaaaagaagacgtagtgttcgtatccagcacgccatcaactctggcttatgaagagcattacagtgaatatgaagcacctaagaaaatagaaacatatcaagcacctgagtacgtacctccgaagaacaattaccaagagtcttacacagtatcgactgcatccacaccagtaattcaaaaagttcagagttatcagcctgccgaatacgttcccgctaaaaatgactaccaagaaacatatagtgtttcatcaacatcaccaccagcagtacagaattacagatcacaagaatatgtaccccagaggcaaacatacaaagctacagaata

SEQ ID NO: 971 - DNA, 587 bp, Plutella xylostella
aagatggcgggactaatggggatagaggaaatatctggacattgaataacatctagaaaaagtttgttattaggtactgttataacattttatagctgataagaaagattctaaaagatccaaagtacgttaacttattaaacaaaaatttgggcacagcggtagcgacttttgttaatttgtagataaaactatgtcaagactatttattgaataataagtttatttaagaacataaaacaataaatttgaagatgtggatgcagtaatgaagtggtttcagttttgttattttagaacatagaatataacatgcttcttattactattactatgctatatttggataaaattaagaaattttcggaaaggctggaatattaattaggtttttgcgcattttataaggtatgaaggaaactacactagaaccgaattattatagccgagcctttcaggaactgcttattttatgattaggtatgtagttttatgaaattaatttgattttttaaaatctagacgtctttcaaatagaggcttcaagattttcatacttaagtatacaaattatttaaataaaaaat

SEQ ID NO: 972 - DNA, 587 bp, Plutella xylostella
tacggaaggctagagagagagagttaaagataaatactaataaaataaacttacaaagaggttttcacgtttctaaattcggaagagcaaaattctttatttgttgcaaggaactcgcccaacatcaataaatcgatcctgggcaaatttgcactgtttgccttaacaaaacctggttccattgttaaagatagattcgtgttataaagtcgataaatcacaaaaacaaatatatatcaatcgtaacgcgcaatcagtatgtaaggtaatcaaaacacagtgaagcgtacataagtatgacgtcatgcgctgtgattggcgtttcagtcaaaatggccgattgcagtattttactcttttattttattgaaaatcttattaatctcaatttttttaataaaactaaatcagttttttaaatcctttgaatgtgtattttcctctaaagtcattaaatctttgataatgtaatactgtcgacacgcctattatgtatcataactatggcacttttatgtcgataatatttattgcctcgattgtaagctttgaaatcgccatgaacggaaatatacgcttttttataa

SEQ ID NO: 973 - DNA, 586 bp, Plutella xylostella
aacttaagtattagctggtgaacaataatgtatgagaacaagcttaatcgggatcgctgtttaaggacaagttctattaaagttaaagctatacttcgatcagtgtaaatatattcgctatagacttaaagctattatattaaaataggaaataaattacgttatcaacaaaaagtgagattaaacttaataatattagtacttatagccaactggactacactgctaaacgttgacaaaatatagtttaaaaaaagaatctcataaaaaaatcatcattgtttagtcagtgtaacagttgtccatagaatagttatagtacttaataataatactggaaatcgtagattctagaaacgaatattataaactgcacaactgtaactataaataaacaaaaatatatatctacgtcttcatcgtaataagcatttgcaattaaagaaaactgcaacataatattattatatatataaaaaattataaaactaaacgaattatatatacaatccatttatatgctttattgcgttgactacatgattcaacaatcgactttgttcactataaaataacttactaaatt

SEQ ID NO: 974 - DNA, 585 bp, Plutella xylostella
ttagagatagtgtgtggtgttctggtgtgttgaataagagtagtgttaagaataaaaagttgtctaacagaaagtaccttacataattgatacagttgaaatgtagggaaaaggaaaggtcgaaaagtagcaacttttaaaatagcacgttgagctatttcaagaggcttaatatacgttttgcaggcaccaccccaaattgttatacaatatgagattattgattgacacatcgcatagtagacggtccggatgatatgtggattagtaatgtgtcttaaagttttaaaaaagtggatcaatttcctaactcttgatgtaaggtggtcgatgtgggctttgaagttaaggtatttatctaatattatgccgaggtattttattgtatcagtcgaggcaataacaggacatatacattcagtgttcagagatactgtttgagtttgagatgaacaagtgtgagctttaatagaaataggaattgttggttgagaatttgaacgcaaagaaaaggtaataagtttagttttggaagtgttcagtgttagtgagtgtgagagaagccaattgtatacataattaaaa

SEQ ID NO: 975 - DNA, 582 bp, Plutella xylostella
catcccgccggctaaattcgaacaactcaatcaatacgacaacgatgaaaatgataaagtggtgttcggtaatgatatagaaatcaaagagcacaaattagccagggaaagaaataagaatgacgttattgagctgcactttccacatcctgataaattggtttcgacgcaacatgtgaataacaatgaaattattggtaattatgaactgaacagtagtaacgctatgaaatatggtttgaatgttactgaaagacataatgatgaattccgatttcactttcctgatgattccgaaatatggaatgataataacaacaagtcaagccaacttatagatgccgctccaactgatgttaatgaagaaatacattttaagcccagtgaagaggaaattggatatgctgaaagcatttgttcgtatttagaagaaaaacagtgtcgacaaaaagatggatttatttacaaagacacaaaacggtcaaaaaagcctgaattagcctccaacaaaaaacaactggtttgttgcatcctaccactgaaagtagaaccgaaaaagccaagtctagtatttcctgaaac

SEQ ID NO: 976 - DNA, 582 bp, Plutella xylostella
gggggtgggggggtgttttttttttagtaaaaatcacatttatttcataatacttataaataacaattaaatataaacctaagtctgatctagcacagcttcaagaccttgtctttatttagtttatttgtattttattaatatttttgactaaatcgaggaagtaggttgtgtgtataatctctgaaatcataatacattgaacatcgcaaactcccttcaggtaatacttagtcacagaaatcatttcagaaattcgaggtatttacatgcaggttgatgttttatcagtgaaacgaccactactgattagtagacaaattaacatactgataaaattccatcgaaaaaagtcatgactcatgagtgaattaagaccgctgtcaatgtaggtattacccctgcagataaataaacaatacgaaaatgggggtattgccagacataaggacgagatagcatgggttcgttcgagattttcatatagattctttatctgcgagcgttatacatgaaggaatcagtttccgactgacgaagaggctaatctacaggatgttgcaaaaaggtagtaagccgaaa

SEQ ID NO: 977 - DNA, 581 bp, Plutella xylostella
gaggtcccagcaagacagtttaataataccaatcttaacgatcttctaaacggtatacaaaaactcaagaacaagttgaaaatgactacaatcatggcatgctatagcatagtaacggaaaaagttattaatgacgataatttggctgatgcaacattgaaattgatgtctacaacaccactttatgagaaagtcatgtatgtttatgacttgatggagtcaatacaagcttttccacctttacgtgaagttaaaaagaattccaaagtatctgatgactatcgaaataaaggaaatatatgcttacagaataaaaaacattatgaggcgtggcagtactataacctttctctgctccatgctccattagagtcgaaaagctatatccttgctttagctaatagatctgccgtattttgtgcgttgaagaaatataaatcttgtctcgaagatatagaagtcatattctcaatgaattgccctaaggaagtgaaagaaatattaattaatcgaaaattgcaatgtcagaagatgctaccttcggaaaatcaatataaagaagaggattattctcatatttt

SEQ ID NO: 978 - DNA, 580 bp, Plutella xylostella
ggagttctaaacaaatcttctaccaggtgaaaacaaatataaaaatattaaaaattataaaccattctgtaaaactaaaaaacatttcttcttattaatttattttaggacatcagtttcttctcttactatacctaaacaatggaatcctgcaaagtcgactgcgcccactgccagcgctcggtggaggggtgcgcgagtatcaagtgcagcctgtgctgctcccagttccacctggagtgcctcggcagtggcctgcccccctccaactcctggcgctgcaggaggtgcagccagtgtgaacaggccctaacaccgcaagcgctcgagtctactgtagttcgtgcttaagaattttctagtgtcttttgactgtatcgtttgtaataaatattaagtggatgttttaattttggttttttattttgttttggatggatgggttactgactggttactttggataggaataggaataggtaggtattgatagtgaatctgagtgaatcctttcccttcctggaaaagtctcgtaccattgcaaaggaaagtcaaaagcactgactcgaaatagcccaat

SEQ ID NO: 979 - DNA, 580 bp, Plutella xylostella
aagtggagggactgtcacgctttgatcctaatttttgacaaaaaaccaaattttatgtaaaaaatgaattaagaaaaatagttgtgaaattatgtgttattcaaaattgacaccgaaatttcgtaagctataaaggcttacctcggtgtccttacgattacgattgaggattggactgacaaaatacaagagcggaaccctcgggactctggtttcccgatcgtagtcaaaaagagaaaaaataacagaccaaaccaacatgatttgtatgtccatgtgtacgatgattgctgcggcttcggtactggcgtgtttccccgtcatcaacaaacacttgaagctacaaaagatattgaattgtctgaagggcaaatcgtagtttcaccgatacgagatgatcgtttgttatataccaattattataagcccaacggttatcctcgttataagctgcagttgtatcctcttgacgacagtgctatataactgctggccatgtattaagatctctatgattgagaacaagccgcaagagcctgaaaaacctaagacaatgccacgcttttattattaattttgt

SEQ ID NO: 980 - DNA, 580 bp, Plutella xylostella
gtcccgtgatccggctcaagatactttattaaataagtacctaccatgataattatcataattgttttatgagtctttttgattataaattttgtgaccaaaagttgtgtaacgggaagccactggatgcagatggcgggtgaccgtttggggtggcgatcgttaggagaggcctatgtccaacagtggactacagaaggctgagagagagagagagagaggcttgactacctggtagccatgtccaattgaatacactattaattctaaatcaattagattggtcgaaattcatttaagaagttatgacttctaaatatgattagattttcgttgtatggacctgtaatttaaaaactgatttctcaatcagacatcaagtttttttatcctacagataacttttattcagaaccaatcaaacaggcacgaattgtttcacttatattagttacgttatttcttaatgataaaggatgtttctaacttcggttaagttattccaatacaacgtgtacctatccataaaatataggtacttactcccgaaaatccaaagagtaaaatgactgcaacattt

SEQ ID NO: 981 - DNA, 578 bp, Plutella xylostella
attacatgcttcttattactattagtatgcaatatttggataaaattaagaaattttcggaaaggctggaatattaattacttagtaggttttgcgcattttataaggtataaaggaaactacagtagaaccgaattattatggccgagcctttcagaaactgcttattttataattaggtatgtagttttattaaatttatttgttttgttaaaatctagatgtctttcagatagaggcttcaagatttaatacttaagtttgcaaaatatttaaataaaaaatctaatttattgtttagtgaagttgaactgaaaacatcattccatgaaatgtgatatatgttgccttttgtacatattgtaaaataattagattattttcttgtaagtgaaaataggttacctaagtacataagatctatgtaacttagtagtacatatgtctatagttttaaggtctacaaaatgctgagttggaactaaatacttacttagctgctaattttaaatcattttgcgttgtttttttactaacactatttgccgagaaatctcaataaacgagtttgatgaaca

SEQ ID NO: 982 - DNA, 578 bp, Plutella xylostella
cgcggcctattcgtttttgcatcttatgtaaagtcacctgacaatgttgctgattacggttcacgtttaattaatgtcgatacagtatgggaactggctgattatgcatttacccagattgagaattgttttggtattcttgaatttgatttgtttgcgagtgtacaaaatgcgaagtacccaagatattcgtcttggaaacacgaccctgatgcagaattaatagatgcttttacttttagttggcaaagcctgaacttttacgcgtttcccccctttagcttagtagcaagagtactacaaaaaatcttatctgacaaagcaaatggggttttagtggttcctatgtggccatcacaagcatggtatcccctgtggtctagattaatcgtatccttgtatttcaaccaagtgagcatctattattctctcctttcaggaactatcatccattacatgcgaatcttaccctggtggcagcgagattatcagggaatcgctaaaacatcgtggtgttccaccagaatccctagatatagttctagcatcttttgctaaaaatacaatttctcaatata

SEQ ID NO: 983 - DNA, 577 bp, Plutella xylostella
cttcaacgggatcttataccatcaactttactggatagtttttagttgttgaagcgtagactgtaaacatcttattgttaaaaaagataattctaagctgaggttctacgatttaaaaaggaatggtaaagaatgcaaatgtgaagagaataagcggttaacttttttaagaataaaataaatgtacaaatatattttttactggctggttttttactaagtaggtattagttcatttttattttgttacgactagtcaatactttttttaaacgtagtttttagttttattttttgttaactaacataactttcctgaagtaacaacgcaccctatttattgatgtagtgatattttcatccatttaaatctaattattgtatgtaaacttatcaatttaagtctaaatttaatgttttttaggctttttaaatatattatacacgacactaaacattaagacgacaacttcaactacggaaatcaatgaaacattgagtgtaatttattacattcatacaaaaaatcatcaaaagtaagttgtaattactaaagctcattctgatattttagtat

SEQ ID NO: 984 - DNA, 577 bp, Plutella xylostella
tggtacgtaagtacttctccaaaaacgatatttgccaaagaaacagtaaaatgatgtaactacatattctacatcattaactttaatcatatgaagatgtttaaaagttcagatatttaatctgtttgtttgtattgcttttttacaattgatgaacttcttaaaaaagttattaagtattggtctattctatagttattattgtactacctacataaatttaataatgttattaattagcactttgagcgaaaggggcacatttcacgaaatggagttaagtataatgatagataaacttaaacatacttaaaaatacttaagtacttgcttacctatggtttttatacgatcacgaaagcgagaaaataaacataaactagctctgcactcatgcgatagcttctttctatgattaactgaactccgtgaaaaatttgagatatgcccctttcattctgaaggtgtttgtagtaagcaaattatggctgtgttagattaatatctcccatgtttgaaatttgtatgagtatttgataaattaatgataaaatgtagctttgaatgtaattatgaa

SEQ ID NO: 985 - DNA, 576 bp, Plutella xylostella
ctgaggctgatagaggtatcatcgaagctgatgttaaagtcattgaagatatgcacgaaaatgttgtgagtgttttacaggagaagcgagcacagttacaaaatttagctgatcatgaggagtttattaacaaaattgaattcgaaatagatgaactgctgaattggttagacagaatctacgataatctttctgtacaaatttgtaaaattattaatcttgatgtaacgtttataaaggatttgacgaaaacattaaacgaaatacttgcagaagtatccgtttctgatgaagatgaaacaataaaaaacatttctgaaatggaggacaaaggtgtagctcttaaatctaccatacgtacaaactctacttgcgatttagagatcacaacagtattaaataaaataaaagtgttagaagaacgaattgcgagactccgagataacagctcagctgcggtgacggcattacaacacaagaaaatataccttgaaggatacctgagggaactacaacagctaaaaacatcgatgcataaactgcaacttgcatcatccctttccgataaaatagttt

SEQ ID NO: 986 - DNA, 575 bp, Plutella xylostella
caaaactttaataatggtcctaaaagggtcctgtgttaaaattaaccaggcgctattgtatattttggtttggagttcgttgatgtatcaagtgtcaacactattgtgctaccagacggcgtgcgctggctgcaagcagggcgaccgtcggacgcgggcgagaagcacggtcgactgtagcaacgcagcccgtgctgacgtcaactggatcctgcgcgacagggtcgtcggcaacaagttccctaagaaacctgacaagccgatgtgcttgttcttttatgcgcatgtgggttaccgctacgacgtggtgcgggggtgtgtcggcgaactcgaagacgccatcacggcctgcgagagcatgaaggcacacgtgaggaagaacgaccgctacaactacgcccgctgcaacatatgccgcggtgacagatgcaataacacgaatagggttgtcacgcattatgcgctactgtgggttttgtttgggatgttgtgtttgtgtcgttaggtgaaaatttgatcggtgttattattgtgaaagtgttgtttttggaataaaattttacgatgatatagag

SEQ ID NO: 987 - DNA, 573 bp, Plutella xylostella
cctgagcctgaggaggaggtaaaaaaagaaccaacaaaatgtgataaattcaaggagcaatttttcaaaactaacaaagatttccagaaatggagacgacaaagaaatgcacaaacagacataatgagagaaaagatgggaaaagtctacaaaagagaatccgctgttgcgaagaaaaaaatgaggaaaaaatttaaagaaacgtctaaaaaggcaaagaaatcatttaaaaaagcttcaaagaaagcgaaggcaaaagtaaaaaaacgagctaaagacacgaagaagaggatcagaaacaaagctgcgaatataagaggagacaaggcgcccaaggaaggtgacggattaagtttaagggatctgaaagacataatttgttcatcaacctcatcgttgaccgccaaggctaaaaagcacaacgaagaattcaaagccagaagagaagcccaggcagaagaatatcaaagaaagatggagacactccgagagctcactccgaaacaagtcaagaatccatgcgcctgcaagcagatggagaaaatcttgcaagagtatgatctacggaaatct

SEQ ID NO: 988 - DNA, 572 bp, Plutella xylostella
taatgatacggcgaccaccgagatctacacatagaggcacactctttccctacacgacgctcttccgatcttgtatattaacagagtgaagagcaaaggggtcattgtaaaactataataatgcagtccacttcattaaatagtaggtataataccatttgtaacttcactcacaaaccgtccataggcgttctgctcactgctagagtcgagtcgaggcggtatcaatggtagcgtggcgatgatggctttaaagctgcgtacagaccggcccaacgaacgccaacgaacgggtttcgttgaccttcgttgctgcaatctgccctgtattatgtatgataaatatccatcgttgggggttcgttggacgttcgttgggccgggctgaacgcagctttatattatggcgtgacatctttgaacgctatacaagattgaataaaattgagaggccaaaaagagtagttttaattttatttgctgagaatcagtctattgctatcgtatagtttattttgtaaatgcctacaagtgactgaaatataccatgttatttatgttgtaataaataa

SEQ ID NO: 989 - DNA, 571 bp, Plutella xylostella
ctgcaggtggactgatgtcgaaagagaatagaagataaagataagcaaaattttggggtgaaaacatggaagtttgttcagaagacttattgcagttcagtgcctacctgagtgggtttctgctattcactttagctgcgtattgtttgatacaaaaatactccgacttttccaacagcgctcaaggggactcgccttgtctttaaaggaataaccctacacttgaatagctcctttaactagaaaacgttaaattaacaaattaaaatgttgggcaatatatttccgaagaacgttttatcaattagtgttatcctcacaatattgatcgtatgccttgcaacagcatacgtatggaatgagacaaggaaatgtattcaacaaaataatgttactgaacaaactattccatcgtgacaggaagaataagactgtggcacccaaatatcctttcgaggcatacatgaatgagataagaagccaaatgccttatgtcttatctatgttgaagatgaagtctataaacgttgcacaggcaataaaaaagcaaatgacattcaaagactggatg

SEQ ID NO: 990 - DNA, 571 bp, Plutella xylostella
caaatcgtcaagttgattgtacaagcgtcacaaaacgccatcaatgaacgcactagtgatacaaccaaacaggagattcaaccagatgcctacgacatatgtatagttaaatcgaaccagcaaattaactcgcaaccgttacaatggccgggaaataaatgtaatttacaaaaatatatttctaatttgtaaagtataattataaagttcataaaaacataattatcacggcacaaccttctatatgaaaaaaatattacttatttacatttatcctataaaaacataatattattataatacaggattttttagcaggcaccgggccaatgcgtgggattataaagggtgttgttaaaaccttattgtaagtttgacggcagccgtgaagtaagcgtccgcctattggtttcgtacgtatcggaccaaacgaattgtcataaatgtatggagaaacagcgtcggccatgccgataaagtatgaatttctatacaaagaatactgaatgcgattcgtccgttgcgtactatggcgataggtgcacgcttacctttgacattactcacaaat

SEQ ID NO: 991 - DNA, 571 bp, Plutella xylostella
cttagcttgatatcgttgctttatatagttggtctatttaaaaaataactatcataacattcttatgattaaaaaagattataacctcaaccacgttgcttcaaagaataaataaacttatatctagatggagaataccgatgctagttcaagtaaagaacctcttactagtacagatgaacctgctaccagtaaagaggataaagaaaaagatacagaaatggaggaagtgtttaaacgaatggaggaacacggcaacaacacagtagataatcttataaaatggatgatagaggcaaagatcgtgatggacaaagcaggagaggaagctgctagggttctatttgaaggtgcagagaaaggcaaggtgaaggcagaagagttcaacgaggtattggaacgaacggcggagcagcagagccgcgacatggatgagttcatgcagcagctcaagacaggtggcaagaagtttctggaagccctaaaggcgggagcgaaggccttcgaagaacacatggagaaacataagaaggaaaaggaaaacaattagatgctaataaaatttgatttt

SEQ ID NO: 992 - DNA, 566 bp, Plutella xylostella
aaaccgaggtgcaggagttgaaagaacaaatctccaaaatgactgagcaacacaaatccgttatcaaagaactgaacagtgaagtaaaggagttaaaaacgctacttgatgaacagaaagcacgctttgaagctgaggagcagagaaataaagaagcagatgaaaaaattgtagcaagccaagcttgtattgaggcactaaaagcaaaaattactgagatggaggagagcagaccaaatccggaattaccaactgaaagagaaatggatctatggtcagagctgcacgcgaccaaggagactctgcgggtggcagaggacgaggtgaccgcctgtaaacgagagaaaatacgcttcctggaaacactaacgaaaataacgaaaactgaggacaaagtggggatacagcaaaaattggctgcagaactggtgacgaaggaggaaataatagacaacatgcaaaggcagatccgagagctatcaaagaacgtgaaactaaacgaaaataaagtgatgcagtatgaacaatacgtgagagatttacaagcaaacaacaccaataaccaa

SEQ ID NO: 993 - DNA, 565 bp, Plutella xylostella
gttgcttatgggatggagtcatatttctttgcaagccattgcgaagatggacttctgtacctggtactagttattattctgtggtataggtaagtatattatttttcgattttaaataaacactttttaaagtgttattttcgataaggaagaaggcggattcattgattaaaattgttggagtaattcgcctgaagtacaaataatgttcgggtgttggtatcaccggcgtcgacggttatacattatgcatgtagttttgaagaatgagctacatgaagaggcaccttccgaggtgcgtaaggactataatcggcagaccatcgaggcgaggactgtaggcgaaggcgatacaatctgcgtcgcgcattgaggagcacaataagtatttgacttcctctcccacgaactgagcagcggatgtctcgacggccgacctccggcccccgaccaacatacattatgtcagctacgtaattatatcgacttattcttattttagcctcgtctcgggatggaccaaacaagaccaaggtttcctacctggcctacattatacagccaa

SEQ ID NO: 994 - DNA, 559 bp, Plutella xylostella
ctctctgacggaaacggaacaataaactcagacataaccttaatatttcggcaaaacattttaaattattgttttagctacgctatgtatctcaaccaaaaggcaattgttcatacttactaaaaaaaatcttagttactaaatgatggataaacattaaaaacactatggaagaacataagaaactgaaaacatcattagaaattgtatcaatatcagtgccaccacccttacaagtcgttgttagagtgctgaaatgtttgaaaactgtgattcactaatctagctgctaaagaaatgaggattcgaaaattaacaatcacttttagatgaaaactccaacgacttccttcataagtcaaacgagtcaaaagttccatttcaatgtgttggagttgacgattattatcgtggcatttcttgtgttcttcatagctgtacttatcatttacaaagtggtattcgtaccaccagcggtagttcgaccaaatgccacaaacgaataaatcaggggaccatgaagctttataggagcacaagatttttctgtgaagagaca

SEQ ID NO: 995 - DNA, 558 bp, Plutella xylostella
ttcgcttcctgtttaccccttttaatagcgtgttttgaataaatatcaccttagctgctaccctcaaagagtagtagcttttataaaggcgttctcttcctaaacgagttcatttctattgcatttctctctcgagacgacttgctgactccccgttgggttttgtttgacgtcatcaatcaacgttcaatccgaagccacttacttggccacagttggcggtgttttcccactgcttgcccccgactcgcagacgacactgacagtgatgtattacacttttatccgcgtcgcttttcttgtaggtcaagaatcaagctgacgattccgactagaaatatagaaaatactattattgtactacttacatcgttcaatgtttaccaaacatttaatgtattaccgtaaaaaactttaaacgttatttaacaagtgtttaagacgaaatttgactgatttgttagtcttgtgacagccacattaaacatctgttaaatactgtctaactttttttgtaagagttccttacctttttagttaacctagctacacacacaa

SEQ ID NO: 996 - DNA, 558 bp, Plutella xylostella
aacacgttcctgccgcccggatacaagattgaagtgcagagcaatggacaggtgagctgctttttcgtgttttttttactattatacagggtgttggaaaagtggtttgttaagccaaaaggggggagtctgggggtcatgctgaaagaccagagtcacctttccgcttactacaacttttttgtaacaccctgtatgttctaaagggggaagatttgtatgtgtgtttgaagccaataaactcaaaactataggaagattgttctaaatcatgcttcattttagtatgtggactactttaaatcccacgggaaactcatataaaaaaattaagtgaagcttgatggataaactgtcatcatcatccagtctctacgtttgctccgacgcagtctccactgttataggattttcaacaaatgtcatggctacgagcgtataaactaaaaaaaaagtaactttgccccatcccagatatggataaaaatatccattttcatcatggaaacaaatttgttatgtataaaataacttaaccaaactgaaaccttatgtttt

SEQ ID NO: 997 - DNA, 556 bp, Plutella xylostella
accgcgaacaattctaacattattgacaacacgatcattctgaaaaaagactacgaagactgccgagagcatattgtgtatttgaagaataatacgagggatattcagactcctatcaagtttaaagtaacgtacaagctagtccacgcggagccgcgctacagcaccgtggggtcgctgcccaacatcgacgagtacccggtgctgaacgccaccgccaccaccagcttcaccgccaacttcctcaacgactgcggcagcgacgccgtctgcgtcagcgacctcgtggtggaccctcagttgatgctgcctaagaccgaagatggtttagactatgctctaacactgggccaagaagaagaagtgaagctagcagtgaaggtggacaactacggagagtcagcatatgaaggacaactgattgtgatgcatcacgaaagcctgcattatattgcagctaacactagcgataaacacgtcatctgcacgagcttcaacaagacgatagtgacctgtatgctagagaacccgttcaagcgacaactggagggagata

SEQ ID NO: 998 - DNA, 552 bp, Plutella xylostella
ctttgctcagccacacggttataagattatgaaaagtgtcatcgaccaagaattggccacacattaatcgtaaactaaagctcactttttaacggtgcggtgtggctaagacttctgcataatatactatatagaccacaaacttcagtttatgcccttgtaacttgtctggtacaatgtcttcgttttgaataaatactttgtaaactcattgactattaagttctttttcatattcttcaccatggtcgagcaaaggaaaggcatacaaatattttcatagccacatccacccattccatttttattaaaaacatattttaactcttaggctgaagatggaaagcctatattcttgaaaggcggattttgtgaccgaattttgtacagtttgacatggattttatgtcttgttggacttgtcaatgttgtgcttgtcatctatgatcactccaaaccaccctcatggaaatcagtttgttaaaatttgatgaaggcttttcacattacaaaacttgattgtgataatgataataaaaactatttgaaacc

SEQ ID NO: 999 - DNA, 551 bp, Plutella xylostella
agatgcccgacgcgaggagttatgaggaagaagagtttataaaatgcttgctaaaggactttcgatgcgaagacttgaacggaatatacgagcgggacggaagacctgatggcttcctggaccagtgtaatggtaaaaaggagaacagcgcaggagacccggagaccagcgtgtattctacgatcagtgatgaagatacttcgaagaaagactgccacgtgaagatcatcaaagtgaccaatgtgtacaaggtggcgtatctgaagaactacatcaaacagaagcggttgcggcgcgctaataaacacgcattgttggaaaaaaagatggagtccatcaaaaagctcctagaagactggcagacgacccttaacaacgttttaaacacgaagctgagaataaccctcgatccgagccagctcgaccatgtctctcaggaggccatgtgcatggaagccatgggggactattcaaagaccaactgctcagaaactgacagtgacattaaaatcaacgaggcatatgaagacccgaatttgaactgggaccaa

SEQ ID NO: 1000 - DNA, 549 bp, Plutella xylostella
cggtgttctttttcaaaagggaatcaaattccttttcgttgtcctcccgctctgccatcagttggcttgagaggtaagctgtaagctaaaccctggattaacttaatatgagctacatgtccctaacccacaaactctttttcatccccgcccaccaccaattaacactcacccaacctaacctcgtcgccaacagttccgctggacgttcaacaacacggccaacagcaacgaggtctcagacgcgtatgtctcgcgcgcgggcacgagctccacggtcacgtacacgccacacacggagatggactacggcacgctgctgtgctgggcgcacaaccgcatcggccgccagcgcgtgccctgcgtctaccatattattgctgctggcaagccggatcaggtgcacaactgcagcgtggtcaacgcgtcgctcgcctcgttcggggtgcgctgcagcgagggcttcaacggaggcatgccgcagagcttcctgctcgaagtgcgagagattaacactcaggacatagtagcaaacgtatccagcgccgt

SEQ ID NO: 1001 - DNA, 548 bp, Plutella xylostella
acatgtggtcggttgttgcgaaataaaataaaatctgaatttcaaattgctgattgtagatatatgtatacaaatgaattatgactcatgatttcacttgataacggtaaagttggtatacaagctatggttttaacccacgaaagtcataaatgctaaattattacttccatgtaggaccttgacttggaagaagaaaaaattgtttaatgttgtaataactgtataaattaattgtaaatagtacattacatactataattgctatgataagttaaattaatatttgtgcacgattgaatattgtattcgttattaattaaatgtaaacataattaaaactatgtaaacctatgattataaagattctgagcagttttagttcccagtacaaataatattatataaactcttcttaaaacataacaaaattaccgattataatgtatcaaaccaaattttaatgttaaaaaactatgtacataatatttaagtaataaagtaatgattatgcttaatattaatattaaaatagaatttaataaaat

SEQ ID NO: 1002 - DNA, 544 bp, Plutella xylostella
caccgcaagatggtgaagagattggagagtattacaactttaagggattgaaaagcttcatgaaggtttctaaagataaacgagtaaagaagatagttaaattgcagtacgatgtctcagtcagggtaattgatgagataatagaagtcgatcacgatgaagaagaagatcaagtacaaaaacgtaacgaaaaactatcacttaaaatggaaaatacgataaaacacgatgtagaaaatgaaattaaaaataaagtaacatatttaataaatgctcaggacaaagtgagaactttattattgaataaacaagaagaacaactagaaaaggaacttaaagacaaaatcgaaataaaaattaatgacacagtcaaaacagatgaaaaaaatcagatagaaaataatattaaagatcaaataaaggaagaaatgcaatatcaaattgaacaacaaaagaaagtacaaatggaaaaagatatgattgaaaaagaaatgaaattacaagaggaaaaacaaatgaaagaatccttagtaataaaagaaac

SEQ ID NO: 1003 - DNA, 537 bp, Plutella xylostella
ggagagcgagagagcgacggaaaatgtgcagcgcagagagagacgagacgaacgaggagttggcgtacatcgactcactgccagaggatatccgtctagtagaagtaacgtccaacatttgggggacaaaattcaaaatgcacggattagccaagaatgtgcctgccaacttaggacaagtgacgtacaagacttcgttgctacacctgcagccgcgacaaatgactcttatgatcactgaactgagggacgattacccagtaggtccagaccccacctttaaccctaacatattttcggaagatgaagaagacgtcttccaatcgaatgataatgctaacaactcgccgtcccatactaataataacattagaaggaaactaacgctgaacgaaagggtcaataacaccaacaacataatccagaatgagactgccattaataataacgcgaacccttctttagctcgcgccgagtcgtatgacgagtttccttacattgataccaataatgagagtgtgagtaatgtcccggaga

SEQ ID NO: 1004 - DNA, 536 bp, Plutella xylostella
aacttctcgggcgagccttgaaattgtaacatcgatacagattttctcagtaaattttgtgtaaaaataaatatatatattttttaaacctcaagaagttctaaaacatgcataaaaattattgttaactataactaaataaataactaacccatatcgcaatcaaggagatttcaaatacaattcagacccccagaccatacaatcaaaatgactacaatcatacaggaagacgaccgggacgggtattcgccagcgaagatgatagaaataaaaggcgttccgtaccacgatgatgaggatttgtatgagatattgctgaagatctgcatgctggctgggtgtcacgtggagagagaccagctgactttcatatgccgagagtctaccaggtcgaagagaccccagaacattgtgatttgcttcaatgaacgcgcagtgaaggacgaattcgtccatgcagttcaggaactcaaagatttgaccaccaaagatctgggctactatgaacataacaaaatttatgttatttaatt

SEQ ID NO: 1005 - DNA, 529 bp, Plutella xylostella
ctggcgctgcgtcacttctgtttgcgttagttctgtgtatttgttgagatcctcaggcgccagtatgtggtagttgaagttccgcttgacgaggatcccgtgcagctccgcgcccggctccggcgccgtcatggccagcgaacccattaccttggcagtcttgtctccgcggaagctgaggctgagcacctgcgtgttgcgcggcgtgtgtatcgcgagggctccgcggtgctcgcgctgtagggcagctttgagacgggacatctcgttctgctcgccgtggactagcaccacgtgcggcggcttcaatatattaataaactcggaggtctgctggtagtccgtgtgagccgagaacgatatgtagtctactgacatcttgagaggcagcttctgtcccgacatggaggtgatctcttcaggctccgacaggatcgtcttggcgagcgtgcctagatcggaagagcacacgtctgaactccagtcacagcgatagatctcgtatgccgtcttctgcttgaaaaaaaaa

SEQ ID NO: 1006 - DNA, 527 bp, Plutella xylostella
ggagagcgagagagcgacggaaaatgtgcagcgcagagagagacgagacgaacgaggagttggcgtacatcgactcactgccagaggatatccgtctagtagaagtaacgtccaacatttgggggacaaaattcaaaatgcacggattagccaagaatgtgcctgccaacttaggacaagtgacgtacaagacttcgttgctacacctgcagccgcgacaaatgactcttatgatcactgaactgagggacgattacccagtaggtccagaccccacctttaaccctaacatattttcggaagatgaagaagacgtcttccaatcgaatgataatgctaacaactcgccgtcccatactaataataacattagaaggaaactaacgctgaacgaaagggtcaataacaccaacaacataatccagaatgagactgccattaataataacgcgaacccttctttagctcgcgccgagtcgtatgacgagttcccttacattgatactaataatgagagtgtgagtaat

SEQ ID NO: 1007 - DNA, 526 bp, Plutella xylostella
ttagagggattatgggaattagactgattttggtgcgactcaaaatgcgtaaaaatgttatatctagttatacgcgacagaaattgtttaggaaattctatttatacttaggatgaatgtagtactttgctgtccaattaatgcaagcatgtgaatttaagagcatgttttggatacgaagtaattttatttattctagatgataaattgtcaaaatttaaaatctcctgtagtagcattattagtagaaaatttgctttgtttcaatgtgagtaaattagtccttagataattaaattattcggttcaattttatcacaaaactacaggattgtggtgaggagtaaggaattagaaacttgtagttttgttagtaaaaaccaaaaagaaaataccaaaaaaatgctttacagcaatttgttattataaaatattgttgatgattgttaaaattgttatgttgttatttatataaaaaacaaatgttattgctttataaataaaatactttaaaatgttcaaaaaa

SEQ ID NO: 1008 - DNA, 521 bp, Plutella xylostella
cgtggagagaggtgctggctaatagggctgagaagaagaagcaaaaaggaaaagggaaaaagggtaaaaagaaaacataaataatagtttacacatcctactactcactcgtcttttaaatgttacagttgagaaagttacagaagaaaatagcagaaggggacacgaagaaaagcaagaagttgaaagagaagttaaaaaagaagtgagaacgcaactttttaatatatattttttattgtaactatcgtattgtttcaaagaacagaataaaatttaaaagtttaaaaaaatataacagcagtattggtcacgccacatcaatcgtatactcgtacttaagtacttacataaatttcaacgctatttaatttccattatctgcctccgtaacagtaggtaggtactaagtaagttttacaaaagcctataaaaggaatgccttctttttctctccatatactcaattaagtacctcgcatactttataagtcgttctccaacaattccaaatgtctgat

SEQ ID NO: 1009 - DNA, 521 bp, Plutella xylostella
catcgacgtcactatctccatcaggttgaatagggatatcattttacccaattcatcgcttgtgactaatttagatgagatcgatcgtaaagctgtaaaggaggacgcattgaatgtttctacggcaatagctaagtagaattcatatccgtttttggcaagggccgatagaatagcgccgacaaaatgactgcagttggatatcagaccaagaaccgagtcgtcccatttcaacatgcgactaaagaaacttattgatattaatgcacctgaaacacaaattaagtttaaaattacgtgactttgtagaggtaataattataaatatactgttgcagagtagtttactttctataaataatatgatttagcttaccaagtgcatgaacgcacacgtaaaatgtattgaagaagctatacttaacagcgtcccactgaaagcgatatcttgtgaacaaatatcgtactgtaaactctccataagacggcccataaataaaagcaatggccgtgaacactag

SEQ ID NO: 1010 - DNA, 520 bp, Plutella xylostella
cccgacaccatcgacgtcactatctccatcaggttgaatagggatatcattttacccaattcatcgcttgtgactaatttagatgagatcgatcgtaaagctgtgaaggaggacgcattaaatgtttccacggcaacagctaagtagaattcatatccgtttttggccagggctgataaaatagcgcccacaaaatgactgcagttggatattagaccaagaaccgagtcgtcccatttcaacatgcgactaaagaaacttattgatattaatgcacccagtgcatgaacgcacacgtaaaaagtattgaagaagctatacttaacagcgtcccactgaaagcgatatcttgtaaacaaatatcgtactgtaaactcgccataagacggcccataaataaaggcaatggccgtgaacactaggatggcttttgtgcgccggcgattgagatcggaagagcacacgtctgaactccagtcacagcgatagatctcgtatgccgtcttctgcttgaaaaaag

SEQ ID NO: 1011 - DNA, 512 bp, Plutella xylostella
tccactgacgctgattcttcaataagtatctcctgttggctctcaacgcagtactgcagcagcaaactcaaaaaaacagtcgataaccacgacatgtttccggtcacgcctctatcgacagcagtttatcgatatcgacaccgcaatcgcggcgcatcactgtcacatcactacgcacttgacacttcactgcattttgtttttggaaattcgaattccgaatgcgaccgctcacgagcgctggctggttggatctgtttactccagagaagccaccgccaatcagcgatcccagaatccgaacacaaaccgatatctggttaatttgaaccaccacagcacaccataacgtaaatccacagacacacaagccgtcacaataaaaaacacaattgtaaacacacaataaaactcaaaaataaacacccgaaacacagatggttactctcactgtgttcttgattcccgaattcggaatacgtcgaatggattttacgatcgcgcgtgaatat

SEQ ID NO: 1012 - DNA, 510 bp, Plutella xylostella
ggcagacgactatctacctaaagcgatatgtcatgactgtttgaaacaagtagtcactatgcacctgtactctatcaaagttaacaaaacccagaagtacttggacttccacaaacagagaagagacgacagagctcgaatctccgtcacagtaccaatattgaatgaaacaccacccaaagaagctcgattaaaaaaatcacccagagaaactaaaccgctaaacaatgaccaaggagacactaagtcagtaaagcctgtggtatccaagaaagttactccaaatgaaatgaaatttctggagtcactgacaatggaagagtttgcaaacactgagaaactcgaccaatgtattctatccagtcccggcagttccaacgaaggctcaccaaagaaaataactacaaataataataataataaaatagaaaaaaagagaagcaaaacaccatcgccggacgaaactacgaaaatagacgttttagatccaacagtccttataaacggtag

SEQ ID NO: 1013 - DNA, 509 bp, Plutella xylostella
ctcacgtggtgtagggttacaaaaccactcatagggctccgcacaccgcataacaatattggtatcggctgttgtaatttaaaacggacattataaatactagtggcgctggctggtgtagctgacttgtgtagtgagcgcgccggctgacagtgcaaagagcgggaaaagtttgacgtttcgagaaccgtttacgaagaaggcttgtgttcatcaatcaagatgattgtattaaagataacccttctcacggcgtgcttggcagcagcatcagctcagcagtacggacccaccactacccccgtgccaattctgaagcagatcaataaacaaaacgatgacggctcttacagcttcggatatgaagctgctgatgggtcgttcaagatcgagaccaagtaccccaatggcgatgtggccgggaagtacggatatgtggatgctgaagggaagacgagggaggtgtcgtatggagctggcagtaaacgagggttcgagccgcaaggaac

SEQ ID NO: 1014 - DNA, 508 bp, Plutella xylostella
tgcacacaaattcataggccaacacagttttggcggcgatgcgaacaaaatcatagcacagtcgcacaatttcggtggtgactcaaaggagcagggtcacaagtttgccaatcaagttcacaaattcatcagccaagccccagcccattcttttgtcgtagaagctcataaactaccaacacacacttttgtcgctgaaccgcacaaagctattggtcagtccagtgatttcggtgttcataagttcatcagccagcctcacgggttcggggaaggtcacaaattcacccaatcacagagcttcggcgttgacgccgccagccaatcgcacgagagcagcgccgaggagcatggatttgctggccaatcagtgggatacagtggggagcagcatgagatacacggaggaaattctgagggagagaagtcggccaagatcctgaaacaggactacgaaaaccacgggcacgcctatacctacagctatgctacagacaatggcatcaaa

SEQ ID NO: 1015 - DNA, 506 bp, Plutella xylostella
ttacgcacccaggtttcgacaaaagaatttacaacaatgatgtggctgtattagtagcatcaaagccgtttaccctgaacaagtacgtgagacaaggaactataccgaagccaggcaccgaaactaaggaaaactccaaagttacactgattgggtggggtgtcacgacgaatgatccaaacagcatgcaacccgatcagatgcgatacgcaacacttcgcacgatcgaccacgcgacttgccagaagcgatacagcaatctcagtgccacaataaccgaggcaatgatgtgcggtggcttattagatcaagggggagtcgacggatgctacggagattcaggaggacccctaatctataaaggagttgtggtcggcctaatgtcttttggctacagctgtggccatccttactacccgggcgtgtatacgaaacttgcttatttctctgattggatagtaaatacaatacgtgataataaatgaactgataataaaaaaaaaaaa

SEQ ID NO: 1016 - DNA, 504 bp, Plutella xylostella
cggagaccgagcgacgcgtgatgaacaagactgaagtagaacgaagcgtcagatactccccccacattcacaggcgacaaaccggtagcgcccccaaacagaaccctgtcgcgatttctgcagagctggtcatcgtaattgctaatctattacttgcagtttaatcatatcactgtttggtcaaagacagagagtttcattctcatgtagtcatgttagatagacgggaaagatatgtatttgtacattggtattttgttgctgtaatgttattgacttgaaatattgtttacgatagaataaattgatttgataagactttgttggtggtgttatttaaagatgtggggggaagtttcctgtaagtagagttagtaagcgcgcttcgcggtgttgctgctaatagcattaacaagtttccagactgttcgcgtataagctgttgtagtaactttggtaagaatctaggaattggaaataaaacaataaattaaaaagaaaaaa

SEQ ID NO: 1017 - DNA, 502 bp, Plutella xylostella
ttgacaggcgagcgacactgtttaatggataaatgtgtaggtggtggtacggtagctgaaaaagaaacattgagcaattcattcaaaagctaatagtcggaacaatcaaaggagcttctatgaatttgagagaactttgatcgcaatcacaaccgcaataaattggtgatgcttttatcgaagggtatgcatagtcgtttagaactgttttctcgtatcaggtgttgtccacctattcagcaattataatatcttctatataataacaaacactacctagttacttatttgctctacaaatagcttggttaccaaataaatagtacttattacacaataaatatcggtaaaactcacttcatggattgattttcatacacttgacaagatattaatgatataataagtaatatgatgaaagccataataaaacttaaataattattatgaaattatataagggatataaccaatataaccatgactcacattaacttaactt

SEQ ID NO: 1018 - DNA, 497 bp, Plutella xylostella
gtcagaattctgacactttcaaacaaaattattaagtaaataaaaatgaaataaacaaaatgatctcacaaggatgaacaatagtgaaaccgaaacacctttccaactgaagctgttataatggaggacgaattcaacaaactgataccagtgggcagagataatgtggagagcatcattgattggctaaaagaagcaaaattcgtgaacgacaacacagaagaagcagctagaggctacctcggcggtgacggcaacgttgactttccgacctttaaagacgccctagcctccatagctatagataccaacagaaacgtcaatgagctattcatggcttttatgaagtggtgtcactgctactccacctgtataccaccgcctgaagagcctagtaccaccgttaagaagaggagaatgagaatgaaacctaagtctactaaagatgattgagttaaagattctgagtgggaagtgggaggttttagtcttgtatg

SEQ ID NO: 1019 - DNA, 495 bp, Plutella xylostella
ctgttgctagcggccgccatattgaatgtcgttctaaatttgaatgtgtaagatagcgctttccgttgaaggcattttttttattaaccgtaaggcaccagtttaatgtctgcgagtggcactaagcatgacgcaataactaaatagaaccgttttccccccgtggggcagaaaacagacatttaggtgttcgtgccttcgcttgaaccaccatgagataacgcgttataattcagccatagtaaagtgctagattgactgcttcactagcgccacctagcgtcagacgcaacaatgtgtatgacgatattcatttataaacataattatttgaaattattactacgataatattgtgataattaatttaatcttaattcttatgacctgtaatgcatatttatcaataacttaatatgaatatatatgggcgtttaagcatgaagcatttaatgtaacagtgcttttattcttatgttatatacgaatacataa

SEQ ID NO: 1020 - DNA, 493 bp, Plutella xylostella
cttattcgaaggccaagtcaaagatatatcttcttccagttagaaccaccaaccaaagttccagtatgtgatattttatacgaaaacttttttaactggactgtaagttatcgctttgattctacaatattttggccgtttttcttagtgaaagatgtcaataatcggactattggacctgggttgaatatgaactggattaatcctgaagaaatgctgtcgattgatgaggatctggcagcgaaattgagaaagaaaaaaaaattagcagcttggctagtcagtaattgctggaatgttgagaacgatagagtagaatatgttcattacttacagcaggcgctcaaaagatacaacgaagtcgtggacataataggcttctgcggtaactacaaatgtcccatgacccacatgaaacagtgcgaagaaatcttagagaacgactacgcattttatttagccttcgagaattcgttctctcaaaattacgtaa

SEQ ID NO: 1021 - DNA, 485 bp, Plutella xylostella
cagaaactccttctgacgccaaagagaagaccaaagaacgagcaagaagatgacaacgggaaccaagtgaagcccggcatctccactgtttccgtgtccactgtgtccactcatatttaaacagtattattgaggagaaagtatagatgggcttgtttctgaaaaggtattcaaagttctgttgatctacggtaaaaaatatacaatagctgatggtaaggaacatcaaaaatttacagctatcaaaatatatattttttgcatggtttttagatttcatagcttgaaatttcgaaacggctatgtatattatataataaagtgaatgcatattcgtgataattatggaactagagacattttattagaaattactttgtttttgtatttgttaatctaagatgacttcgtagaagctctcctttgaatagcgttttagagagggttggtagtacctgataagtaggtttcacatatttcagaca

SEQ ID NO: 1022 - DNA, 482 bp, Plutella xylostella
taatgatacggcgaccaccgagatctacacatagaggcacactctttccctacacgacgctcttccgatcctcattggtcagattcgcgagcagtaagccggtgcccatgtcgaagacctgtaataagaaagtctgtctgatgccgccgtcatggcctggagtgcagttcagcgtcagagagtcgtaagtgacatttgtgatctcgcacgctttcggggaagacggcttgtcagcaggtagtatgtgaaacagacaaggcttggtctgccggcccaccgcgttggtcccggagcattggacccacccgtagtcagccgatgtgttcaccatgtatagaaatgtaccgggtaaattctgtgcattgttgatggaactcgtgatcaactcgtgtttagtgtgtgtcgaactgttgaaccaccactggtaggacattggctccttaggattagcatccaagtcgcagtcaatttctaggatctcc

SEQ ID NO: 1023 - DNA, 477 bp, Plutella xylostella
gctcgcgcggctgatctcttaatacatgcctatatgggtacacaattagctattaggtaagtacgaagctagtataagtagtagtaggtacctgcgaacatttagaatacatagagagtacaaaaaccacaactctattatgtgtctcgttatgtagagacgataactttttgtttccgtcctcgatacgacttaactttttaattaatcggtaatttttataggcaatagttattggtggtatagcaagacaagcagaacttataaagctgcatagtgctgcttagtttacctgcagacttaaataacttacgactggtttatccttgtatagacgcacacacacacgtgaaaaatcttgagaaaagttaaattaccagtctttgagctgtgagtgacacatagctacaggcgaaaacaaacaacataccttcatgtattggcgtctgtgtacacagcacctaattatcttgatac

SEQ ID NO: 1024 - DNA, 471 bp, Plutella xylostella
agagaaatggccattctcctttagaaaatgctgaactaaaattgactataacaaacatatcaaaagacaatgaaatgcattaaaacaagatgcaatcaaagtagacaagcaaacacaaaaaaatgaagttaaaaagaataaaaaagtggacaaacaaactcaaacggatgcagaaaagaataatcaaactaaatcaaagctacctaaaaaacatggtaaacgaccagtaattaaatcaagccaagaaaaaaagaagaataaacttttgctcattagcaccacaaaaaatcaaagcatactagagacagcgaaagtgatttggggagaggaatacgagttctgtcattgtgtctatcctaacacagggattaaggtaattttcagtgatctgcaaatgaaattaaaaaatcttacgaaaaatgacatgtgtattatgatgattggagaagaagatttcaaacatacaaataa

SEQ ID NO: 1025 - DNA, 457 bp, Plutella xylostella
gcatgtgagccagcttgtccaagttagcagaaatcttatgcaacttctccggcgtgagaccgtgctgctgcacactagggattttcgggacagacgacttcttagaagacgcatagtcgaaagactggtgctggtttctgggatcgtagtcggtgaagctatcgaccgtggccggctccccgtaggagttgggtaggagggggcggcggaggagaagacgttcttgatggcgctgaaggccgagtggaggagggaggaaggtggttccagaggggtgtggtgcgcggtggccgccacgtgctgcacctcgttggtctccgccagcggcgtcagtatcaccagccccgcgtgcactccgttcagtttgcttcgcccgtcaaggggtgcagggtacttgtgggccgcatacccggtgggggctgagggtgctatgtgcgagtagtgagcaggtgccgtg

SEQ ID NO: 1026 - DNA, 448 bp, Plutella xylostella
cacgggcgccgccaagctgtactgggaacaactgaacacattcaaccgcatcaaccgcaacgcgttcaagccgccggtctcggaggcggtcaaggacatcgtgcgcgccaacttcaccagggaaattgagttctacgagttctgcaagcagaggctgcacctgcagctgaaggctctcaaggaccccaccatcaccctccccggcacacgcctccccacaacctccggcagaagccttagaaagaggagggcgcagagaagacgcggcgtttaaagtaacaaatgagcattatttgtgaactcatgtcgtcggaaaagacttttctccaccgttttgtgagtgttttgttttatagtgaggtcttcagtgtgcgaaagtgacgccctctgtgttaaaagtgatgaagctaaatgtcgagtgaggttcccgttttcaccgcaagatggc

SEQ ID NO: 1027 - DNA, 445 bp, Plutella xylostella
attctacaagaaggctcttaaacagaaagatgaagacgctatcaaagacgctatcgtgaacgtgaaaatcaaaagccctaaggagttagcaaaagaaaaagaggaacgagaaaatgccgaaatagaaaggatagtgaatgcagcggtcgctaaagaaatgaaagaacttatggatcaagtagacgttgaacctgatgaaagctcattcacatctgacgccgaacgagaagcatggaacatgaagaaaaaagctgaagctgatttagccaaagttaaagatagagctgcaaagaggaaagaagaagctatggaaaccaagaaaagtaatgccaaggatgtgactgagagagaaaaagaaagggaaaaggagaggaaagctaagaagtcggagaaggcaaagtatgaggagcagaggaggaacaaggagaaggccaagaaggaggaa

SEQ ID NO: 1028 - DNA, 444 bp, Plutella xylostella
actctaccaggactaggagtagatactatactatcagcaggagtaggagcagaagcaaatgcagcgctacaactaggaaaaggggcagcaaatcaggcaatagaaacaacaaaaaccggagcagaaacaggagtaaaaacaggagcagaaataaaagcaaatgtagaagcaaatttaggagcaggagtacaaaaaggaacaggagcaggagaaacaggcaccaacaccgtacctaatgtcgtgaatggagataattgttcagcatgtggaaacatatagagcggtgcaatgaagaggcaaagttgttaatgtgagaacaaatctctactatcgattgccatctcaacgccatctatgatttattatgtaaaagtaattatttttaaatacctaagtaaaaaataaatgtttagcatcttgaataggtacttatattacttattt

SEQ ID NO: 1029 - DNA, 443 bp, Plutella xylostella
aacgtggttcggataggggcagtagaatatatattatacaaaaaacatattaaatatataattttacaagatagtttaattatataaaaaaaaacgtggacgtctagtgaaaattttgtgaaagccggcaatttttttgcaataaaacgaagaaaaacaacttcagactgtgtgacatttcgccaaaagtgtgattccagctacgtagtgacgcaaagtgaaccttatttccgagcagttttggtgtcttttctttctcaacttttaaaagtatatttacaaaaaaaaaactctattttgtctatgctaatattactgtcgctacaatgaccgcttgaagttcgcgttcaaattccgaatcgtgagtgcggttggcagctgtcaaaatgcttacaatgtcgacgttgatgatgccagctgctaccatgacgactatgacgaac

SEQ ID NO: 1030 - DNA, 439 bp, Plutella xylostella
cacgacgctcttccgatctctcattttaaattaaatagctttatttcatgaattagttaatgatgttgccattttttggtggtgatcaaattcttggggtaaatttatgcgttaggcgtaatggggctattgcgattgctgcgacgcattggctctaaacaaaaattattattgttatttttggctaatttactatcttatttttttcacggaaacctcataataaagacgcatttatttgcctcaaacggggaaaatgcgtcttaaatcacaatttttttaaacactcaacagtttctaaaagtgagatattttcatacattcgctcccattcttccgataacttttagcgaaaatacaacgcaataccccagttgacctcaaatacctttattatttataacaattgaatagttacttaactatacttaatctaaaa

SEQ ID NO: 1031 - DNA, 434 bp, Plutella xylostella
acggcactcagatcagcctcaactacatcgctgatgacgagggagggttcaagcctgagggagcgcatctaccgacccctcccccgatcccgcccgcaatacagaaggctctggactacctggcgacgctccctccgcccaggaactagaatactcaagacacaccacccaccaccagactgactgccgctacccaggacctgcccgaagtaacacaacatcgtccagtaaacagcacccctacctagcctcactccatcccatgctgtttacacggtgtcaaataaacttttgtacaaaatatgcaacgagaaaatcaaataaaaatgaatgaactgtgatagtgacgatgaagacgaagaaaatgtttgtactttatttattatttattgtaataaagcaaaccagtgcgccaaagatgcattgcaaaaata

SEQ ID NO: 1032 - DNA, 430 bp, Plutella xylostella
tactgttcggaagtcttttcttcttgatcgatttccaactcattacctcaacctgtttaggtgggttcatcatcttatcctctgtgggtatgaccaaaaaaattataaattggtctcccaatcattgtacttaaatggttcaaaaaacactgagtacatgacagtgacagtattcaagtccgtatctctggcgtgagatgtgaacacttacccgactgagctaccaccgctcttagagaggcgagtgattacccatcttggtctacattggcacctttgtctgttgctattgtagcccatcgacatgcatgcagcaaatgtaaccactgactggcagggccacttcaacttactagtttgtacacctataagtgaatggtctaaattccctgcctatcctaaaatacttaaatatatagacacatcacaa

SEQ ID NO: 1033 - DNA, 429 bp, Plutella xylostella
ctcctgtacaatccgcagttaatcaatcaacaagttggtggtggttacgtagataagaaggcctacgacgaagcccagaagaaaggtgctgatcaaaatgtggagaagatagagaagaaagctgaagaggagatcaagtatgaccagcaagggttccaagcggctgctgctgcggccaagggtgagaagggagactccagtttctacaaagatgaggaagccaagaagaaggcagcaggtgatgaaaagttctatgaaggaggacagaaattcgacaagcatggtgcaaacgaggaagtgcacaaaaaaagccaaaagccacaagaaagggcacgtgagcaagggcttcaaatcttcaagcagcaagaatgaagaggagaaatctgagaccttctacgacgaagctcatgacgaggctgatcacaaggt

SEQ ID NO: 1034 - DNA, 426 bp, Plutella xylostella
ctggaaaaggtgtggtgtggatggtgtggttgaagtgtatgggagggtgtggaaattaggtagttataggtctagttgtgattgatttacttaaaacaaaagttacttactctatatctttcggttttttgttaataatattattatgaagctacaacgagggcgcttatgtatatataatgcataaataatggagaaacctttttctttcctggaatatttctcgtaaaagataaaaattgttgctagggaaagagcttaaggaaaaccagaacaccttacattgccacacataagagcaacatttgttatttttgtggtatctgatctcctacttacttacatattacaatccattggttggtggaggatacataaaactaagatgataacccgacagtcattataatatgattttacacaaaa

SEQ ID NO: 1035 - DNA, 419 bp, Plutella xylostella
ctcgcagccacgggatgaggatttcactaaggataatagcgcctctccaatcgacctggagtgctacatccaggcggaacgcatctcgaagatcctcggcgaggccatcttcaagacgaaactcgcactatgcatcccgcacctagtgcaagacttcaagaatctcagcgccatcttgtcagctcaggatatggaggaactgattttcatattcgagcaatatgagaaccctcagttctctggtactgctatcaatgcagaagctttggaggatattaagtctggtgttatgtcactgaagcatcgtctgaaccccgagctgagccacttgttggcgattctgaacagctacccggacttcaaaccgatggtggaagatattgtgaaggagatgaaacaagaatacgttcaactggaac

SEQ ID NO: 1036 - DNA, 417 bp, Plutella xylostella
ttggggcgcctcgtttgaagtggttactgttggtgatcttgtatttgctggtaggttctttcatgaaagagaatgatgatggtgcggcgggagtaggcggctctaggtagctaggaagagtcttcccatcagcaccggtagcccctgcgggatgcctagcacttggcggccttttgacattcctgacattattactggcctgattaaacgaatccgggaagtacgagtttccgtacgaatccatcggattgctggcatgcccgtcgtggtcatccaaattcatgttggggtaactattcccgggtatgatgttgtggttttccccaatagacgggaaggtctccagcggtttgacggcgaagggtggggtcttggcgatgctggggcgcttgatgctgggctgcacggactcgaagg

SEQ ID NO: 1037 - DNA, 414 bp, Plutella xylostella
ccccagtcaacgccgtcaggaactgaataacactacggatctcagtacaataacccccgacaggattcacatgattttctcttgtttcaagtctttccagccagttctactgaaataaaaaaagttataacatcacacaaaagatttaggcaaactggatttgtagtaagagaaaattgtggtgtcatccaagcatggaccacaaaatggaaatgtgaacagatgtaaattatatttagtttgtaaaataaagtttatcgtgccatacaatatttgtttttgcttatttgttaccaaaagttctagaaataggtatcgggataagccgttatccgataccatgttgagtttatttttcctgtgagatgtacgacatgttaatgttcggcataaaattcacctagcacccaagga

SEQ ID NO: 1038 - DNA, 413 bp, Plutella xylostella
gatcagtttcgttcgtattctcataatccaaagaataatattgtagataataactatttgtagtcttgtctagtcgatcgaatcgcagttctgccgtagcgctgtcgggcgaacattgtcgacgtcgggacaagcttggtggactgtgtctagataatcggtggcggtgtgacgtcactgtcctggctgtgtgacgtcaccggtgctggtggtgtgtcgtcactgctccttcttgacgccgccgttgttgatgatcttcagcaggcgcacgactggcgcctcgaaggctagtgagatcgcgaaggacgccaggaacgccatcaccgcgtagcccgcgtagattattagcaccatagagttctcgagatgcagcggcccgtccatgaggaaggtggtgtacatcatgacggtgg

SEQ ID NO: 1039 - DNA, 413 bp, Plutella xylostella
ctacccagtgccagtagcgaagtatctgagcccctaccaccacatcctgaagaggtctccacactacgcagctgctctagccccagtatcggtctcccaccagtcccgagtggacgtgcatacttcaccagcgctggctccggtgctgccggttgtcaaaccgtactacgcttctcctcttgttcacaaagcggcggtgctgcctgtggttccgccgtacggacatggactgcattatggatctgtgtacccgcaccactactgaaaacttgaagagtctaaataaacgacgtgataaaatttgatctggcatctgagatataaatattggtaattgctttacttatgaatgtaagtagatatatggtatattaataaatgttttgaacattaaactactgagtttcaaaaaa

SEQ ID NO: 1040 - DNA, 409 bp, Plutella xylostella
cacgcgcccgtggtccactctttccgtgcacaccaagtccacaatcaccaagtcgagccaggtcgtgaaccatggcagtcatgctgtggttcatacgcccgtggtgccggtggttcatgctcaagctcatttagtgcactcgacgcctgtgaagtcgaccgtgactaggagtagccaggtggtgaaccacggcggtcacgcggtggtccacgccccggtggtccatgcccaccatgtgccggtggtccacacccaccatgtcccggtattgtcggtgaagacaggtgactcagcggtgtctcacagcagccagtccgtccacgagactgttcctctggtcgccctccactcccaccattgatgaagattactggttgttgtttgtttataaaagtgttaataaagtgat

SEQ ID NO: 1041 - DNA, 407 bp, Plutella xylostella
gatttgcgtcttttaggttaagtagattacaatatggcatatttttttcgaaataataaacacaaaaaaaaaaaagatatcacgtagttccttacttccagctgttacgaaaaatattttatggcgattgtcttcatcattaattgtaaggtaacgaagtgaatgtttaactgaaggtcggtgtaaatcacacaggtcgttaattattagcaatttaaatgtgatccaatctttttataacgatagttaattatctcattttcattcctatagctcaaacgtctcgagtttactccggtgggtacagttgtagtgaaagcccatctgcgccggcctgctctttgccgcggcggcagcgccatcactactttccttccctccgtatgacgtaacgctataaaagagtg

SEQ ID NO: 1042 - DNA, 402 bp, Plutella xylostella
aagtttgaaagaagtcacagtgacaactatgaaaatgaaaattaattaagattgtcaaaagatacatttattatggctgaattctgaaatattttacccaaattcccgttcaacaaaagaaaattcaatgcgcttacaaataaactatgggggatagttcggtgcagatagcacaaactaatagtaaagaaagtacagaaagtaacaggaaagtgagttcagtccagctgctgaggagtcagaccaaggtgagctcagtgcgattggagacgagcaagacacaagtctgctgcaacgtctgcgaagacacagagcagaagccgactagcagcaagtcgctcgctcaccgtctgagccactcagacgcgctagccctagagcgtcaacacaggagcaactgtt

SEQ ID NO: 1043 - DNA, 402 bp, Plutella xylostella
cgcaccgccgcggacgcaacaaaaagttctaacgaaaatgtccctactatgtatataactgagcgccgctcgcactgtatggactgttattgtcttcgtgtaacatatttcaacgcttgtatcttgtatgttatacatactgtatcgatattgtatttataaatgtaacgttattagttggcggtgtaaataagttaagttgcggaattgtaaatactgtggattatattatgtacatgcgtataacatactattaataatagatgatgttgagaattgtttttttataagtaaatagtttatgtggagggcgcggcgctcgcgagtcccgggcgccgcggccgccatcttgttcgcagtgacattactaaataaatatttaaactaaattatatttacatt

SEQ ID NO: 1044 - DNA, 579 bp, Plutella xylostella
aagtcctaatgtcattcttgtaaagatcatgaaggaacaaaattaaagggttacaaaataaaattctcaataacaacaatccctgaatgtgattcaggttttaggcctaaacaacaacatttacagtttccaaatttgctgtcgactgaagttaagttgatcgagaatggctgatgataaagaagattctagtaagaaggttaagaagaagaataattctaaatacagttacagtttcggagacacacatcccaaaggcgttgaaacaatactagagatggggtaagaagaatcaatataataaaatatttttaccgtttgtattgatcgaacttccatggacctagaaactctgttgaggaaatacaggtattattcccacattcaaaaggtaaaacaaaacaaaaaatattttacaggcaaaaaatcaaaagatgatggatcaccgacatcaggtagagggcgtagaaacgaaacgctagatcccctactggttcatccaaaagcagcaagagtagatctaagagtagagggggaagtggtaaacggaaaaagggcaagaagaagaagaagaaggga

SEQ ID NO: 1045 - DNA, 568 bp, Plutella xylostella
tccaccactggcagattgttacctatagcttgctttcgtaccaccaccgattagaaatgaacaatacataaacagcgtcgcttgacagtcaaacattatgtctgatctgtaaaagttaccgttagatttgacaagcgagcggcgctgcttagtgccaatttctccatttcgacagggattgatttataaattaaacgtcatctccatataaaattcatgacagatgtgtgaaaagttaaccactactccctggttgtgctctaaccgagaaatggtttggtgaagaaggccaatgatagtggctgtgtccaccagccaccgtaacatcaccgaaacattatcaattaacaatatatttataggcatcgtcgctcgactgttaaaatatctatcagattcatacaagttacgtcagttttaaggacgatagtggtggagattcttgggagagggctttgtccacgagctaccgtaccaccaccgacacattggcaattgacaatacattagcatcgtctttcctgttaaacatctgtcacatcatttgacaagggagtaattgttaatt

SEQ ID NO: 1046 - DNA, 556 bp, Plutella xylostella
actggtaagtacagtacagctctacggaattatattgagaactgcctttcattttgaagtcttcatctccttaccatttttctaacaaggacctagaattggctagattttagcgtaactcgctgactgccccgtctgcgcccggcgtatatgtatatgagacgggaaggcaccttaatgctgctatagatagttatgtacctatgctctggtcatgctatccattttgagagactattgaaaaacgacataggtagctgttttttttctgtattcaataactagcatatcccgagagccaagtttcgctttaaatgattttcccgtgggaattcggcgaaaaatttaagcttttatgttctgatgattctaagcttcaagttttatcaaaaactaaacatggttttggcttaaattggtatacaaaactacttactaacttccacggaatattaatcgatatttcataaaatggtttttcccggtaactcccgttcccgtggcaattttgcaatatcatgttgtacctaaacatatgatttttcacactaaagga

SEQ ID NO: 1047 - DNA, 537 bp, Plutella xylostella
gcagatgactgccaaatacttcaatcataggagccgaagctgtcgccaacagaacagcacgctcactctcaattgaacctcttgtaaggacggaggcttgcaggatctatcatgtacacttattactctcaattgagcctcccctgaggacggaggcttgcagtatctatcatattaccagctgacccgcgagcttcacttgttttcccgcaacggaagatagaatagaatagaatactactttatttacttaacaggacataagtgatagtttataatacagtggatacgacgcaataggcggccatatcgctaaaagctcttctaggcaaccattgggtggaggagaaacttaaagaataaataagcatccccttatatttttttccactcctctgtttaaggattttcacggaaatccaaattattcgattgtagtacttaagtaataatacccccatataataatataatacaagtgtaagtatataaactcatttagccatatttaaataagacattttaaatatgaacgca

SEQ ID NO: 1048 - DNA, 507 bp, Plutella xylostella
ttcaaatagatctcaaagccaagaaacgttactgtctcacttagactccctagggcaactgagaagctagctagcctgttattttaagcacaagtaatttttacgatcaaaaacgtaaatataattttattgaacttgtacccgtaatacctagtctaacctgcccacgtatgaactgatggacaaataagctaccattctgtacgggaggaatgaaatgcctgtttacgtaaacaagtaatttattccttcaagtcctcgccctcacgtctgaactccagtcacagcgatagatctcgaacccttgaaatgtattatatacttatatacgggtttacttagattatgcatattctaatattttattttggtttcatttgcgtagttacgtacggcttggtaaactaagaacttgtcgatcgcgtagtttatcgaacgtaaaaaggaaatacagtaaaactataaagtcctgaaaacggaagtggatcctaactaattgttgcagac

SEQ ID NO: 1049 - DNA, 491 bp, Plutella xylostella
cttcaaaaaccatgaacaccataaacatgtgataaacataaacacacccataaattccaaaagagaaaacaataaatatccacgaagtgcccacgaaaaagccacgaaagataacaaacaaaatattaaattacagatctaaataagatgcagaacttcctcaaataaagataaaataagttcaacagcatgtcatgagcctagagaaaacaaaaacctccatttcccaaattttgcgtggacgtgacatatggcagtttgatattcatccactcacttgaggaaagctttatcatcagtgccttgcattggttattcttccctaaaaaccatggacatcattacatccacagagaaaaaaaccatccataaataccaatacctacgagataaatacctacgctacgaaagaaactaaacaaaatatcaaattacacgctaaagaaaatgcagattttcctcgaagaaagaccaaataacttcatcagcat

SEQ ID NO: 1050 - DNA, 471 bp, Plutella xylostella
ggcagtaaattactcgaacttcataaccaacactggctacaaacatacctagctctatctacaaagctacaatgtaaactgatgatcagtaagcatgccgcggtgtgaaatgttaagacgagttgcttagaaaatacttttacttgttagcgatagatggcagggttttctacaatgcattgaggcgggtacttagtacctactttcaactcaatatgtagcgccatcattgaaaaatgaaattatggctatttctgctgggtttcgtatcaagtggtaggttggtcggttcttataacggatatacattaattacatataacttttagtatgtgtatgtatacaggttgttgcaaaaacgatataaacgatgtttcggcttagtatactttcctaccctttttgcaacaccctgtatatatgctgcaaatactctgtaagtactctcattggcttcatccagtcatggaa

SEQ ID NO: 1051 - DNA, 427 bp, Plutella xylostella
acgacgctcttccgatctcgtttagtttgtagtaaaggttcatattaagtaatcgcagtaaattaaaatcgggtagtttttttcggttttagcacaaaaatagagtaattttaattaagtgtattagtgattttttgcagacttgttaacaattcgataatgctctaagagcgagctcgagcaccgaacgcaactggtgtactcgcctcatactgatctacttccatgtaaatttaaatcctgtagttcgtttgttctgttttggtgctaataatttagttctgttttttttgcagactttaatgactttgcaattaccgataatgctctaattttgtgagctcaaacacagaaagtaattttatcagaaactttaaaaaatactttagttgtaattttttatttaactacatgctttaaaaaaaat

SEQ ID NO: 1052 - DNA, 422 bp, Plutella xylostella
atcgataaatcaggctgagcaacaataccgtcaacagcaagagcaaataagacagcaggaacagcaaaagaatgaactgcaaaggcaacatgaacaacaaaggcatcaggaacaacagagacaccaggagagcaaaacaggcagcaggaacaacaacagcatcaggagcaacagcgtcagcaatataactttgacatcgaacaagaacaagtaaggcaacaacttgctcaaaatgtgcagaagcaacaggaagagatacaaagattgcaatctcaattgctgcaagctcaacaacaacaacagcagcaacagctacagcaacaacaagatgctaatcaattcgagcttaactatagacagcttcaaaataattacaaccagcaacaagtacagagtacatctcctaaacctcaatacaatca

SEQ ID NO: 1053 - DNA, 422 bp, Plutella xylostella
atacggcgaccaccgagatctacacatagaggcacactctttccctacacgacgctcttccgatctcccactccctgtaattaagttttagacagttacacagttacagcatgtcttttatcccacaacggtagccagtcagttattgcggtagttgagatggcgcgggtcgtgtttatttgtcttttattaagtgttttggctgtggcggtagccgttaaccagacagtatgaaacaggcccttagcgtgatgcgggacagtgtgaaaaccgccttatattccatttcacagggatacaaacaaaaactacttttattcgaatgtaataaggcttctgtcagatgtctttccccgtgaaacaagaaagaaacagcagacctagtccaggagtatgggtatagtttatttcatcaaacattt

SEQ ID NO: 1054 - DNA, 419 bp, Plutella xylostella
cttgtccaggacaatggttattcttggttttcagtctgttagaaattataatcccagatcacccactaactcatgtctgtctatgaataaactatgaagaatagtcatgtctttttctattaataaagtttgatatatttattgtttgatatttataaaagttactttttgtatttattttctgggttagcatagaatctaatggatctaatgagcagttttttaattgatattcattcactaccaatgaattccttatctacttacctctatcccccatccccatataaatacttccctgtatttagagataaaagtttactgaccaactttcttagtaggttctagtacggtaccgtgatattttgttagctcgttctatacttaataaatactggagttactataaaagaaaccat

SEQ ID NO: 1055 - DNA, 403 bp, Plutella xylostella
ggacagtgcttgttgaaaattggtgctgtgaaaaactcaggtaagtacctacattacttaaaggtcttccaataaattaatggtaactgaaaaattacaacttaggtacttacaacgttaaatatttacctacgattctatgtacctaatatgttgcttgtaaacaggaaaattacaacagaggtaggtacaacattaaatgtacttatgtagttacctctattacctaaatgcggtaattaactatggagagtgcctgtaaattttattcttaatcccagttgtagagtttttttttttgttctagacgagagagtgccattttattgttaatcctagttgtaggtatttttttattctagaaagtgtttttctttgcagaatgaaaatcttcatattacta

SEQ ID NO: 1056 - DNA, 401 bp, Plutella xylostella
caagccgcgcgccatccagcacggagagtacccgtggcaggcgcatgtgtttcagtacgtaactacctacttagaatgtaacttacctacctgcgtacctacattatcagtcaataaaacagcctgtttgtctactgctgcactgctgtttgtcaagctgtttgtgttgtaggtacactttgatattcttaaataacctttgcggtaagaaattgtgcggagcgtaggctgctagccagcagattggagctaaatactgcgtgttttgaaactatacaaggccagaacgcagaggttgggactgctcgcgtaggtatattttcaagttaaaacggtgccatgattcacttgaaagtatacaaggccattacgcactaatcgcgtatattttcaagttagtt

SEQ ID NO: 1057 - DNA, 598 bp, Plutella xylostella
ttacgtagataagaaggcctacgacgaagcccagaagaaaggtgctgatcaaaatgtggagaagatagagaagaaagctgaagaggagatcaagtatgaccagcaagggttccaagcggctgctgctgcggccaagggtgagaagggagactccagtttctacaaagatgaggaagccaagaagaaggcagcaggtgatgaaaagttctatgaaggaggacagaaattcgacaagcatggtgcaaacgaggaagtgcacaaaaaagccaaaagccacaagaaagggcacgtgagcaagggcttcaaatcttcaagcagcaagaatgaagaggagaaatctgagaccttctacgacgaagctcatgacgaggctgatcacaaggtggctgggcagaatgctggctcgttcggagagaatgctcaacaagggttcaagggtgctcatgaggagaaggtgctggatgccaacgcgcaagggaaggaggggcaccatgtgtccgcgcaacagtttgacgataccaaggctaataagggagaattcctgcaaaaggactacaaagggggtgcagaacagctggagaaatacaacaacctggga

SEQ ID NO: 1058 - DNA, 598 bp, Plutella xylostella
tgaagttgaacttacctacctacattatacaaagaagttatatgtaaaggtaaactgacactaaacctacaatagttagttattaaaatgtaggttattacatgattgtagcataatctataaatattatcaattaacaattatttaatgttgtcttcatctgatgatgtattgccaaatatattaatacgacaaaagtacttcaacaaaagttaatacatcagtagcttaatagttgggttgttttacaacaaaaaattatgtatgtacttaaaaagtacatgatatttcttatataaaatttatttaaaaatattcattggtatgctaataggcatattataaaaccaccttacatggtgagtaagtacacctacctacactatgaggtgaggatcagattatattaaaaatacatacctttaaatgttatatattaaaatctggtagtttaaaataacatacctacatggctccattgtttttatgccagctaggcattgtgtagatatttatgaaaattattaatgttatcaaaacacgaattatgaaaagtaaatggatagtaataagtacactgaccttagttttaggaatt

SEQ ID NO: 1059 - DNA, 598 bp, Plutella xylostella
taccagttaccgttttaattagttaattagatacttacctatctatttataattttatgagaaattaggaataaatcagatataacttattaagctcataaacaatatattttactattttccaatgaaggtcatccatcatctatgtagttatacttacaggactgtacctacggtacacaacacacatagtacctacacaattacacataaggaaactatgtatatttctatggaaaaaacaaataccattaaaacattgtatgaccggtttgctgattgctatacttaactaaacaattatgaggatcaatatgtacccacctacctgcgtagataacatcatactatattatgaatatagtgtttatatataccatattctaaacatcaacgagtgtattggatgatgtaagtaacatgtaacaaaggtacaatatcgaagacaatcttgaatcatggtctaaactctaaacgaataaaaaacaagtgaaataagtactttagacaaacaaggtgggtagattttgattattctagagctttatggcgtttacttgatgtaatctccagtgaccggaagtaagaagtaaattat

SEQ ID NO: 1060 - DNA, 598 bp, Plutella xylostella
cttacatacataagtaaagcaattaccaatatttatatctcagatgccagatcaaattttatcacgtcgtttatttagactcttcaagttttcaatagtgatgcgggtacacagatccataatgcagtccatgtccgtacggcggaaccacaggcagcaccgccgctttgtgaagaagtggagaactgtagtacggtttgacaaccggcagcaccggagccagggctggtgaagtatgcacgtcgactcgcgactggtgggagactgctactggggccagagcagctgcgtagtgtggagacctcttcaggatgtggtggtaggggctcagatacttcgctactggcactgggtagccgtgatgaagaacagggtatggggcaacagccaccggcgctggatgtaggtgcgctgccggcactacgtagggcaccacggagtgaccctgggtcaacgccaggcacgcaaatatcacaagagcaccgaacattttactagaataaatcgagatcaggctggtataagttcagatcagaggagtaagttccttagactggtgactgaagcctgaagtatggtgttcttatactaaatcttg

SEQ ID NO: 1061 - DNA, 598 bp, Plutella xylostella
acgcaaagaaacattcagtgaaaatggataaaccaaaatatcaggcgaaaagttccaaagaaatcagaaatgtgaaagtaaagttgaatcggtgtgacacaaatgaacaaatagtaaaattcaatgagtttaataaagcgagtatgttaaagaatctacaggtagaatgtggtggttctaaacgtagaaaatctatgaatcaatgtaaaatgggtgggaagaaaccggttaccgtaaatatgtgttacaccgtggagaaagatgatcgtaccttgatggaagcccagcctgacattccttcagatgaagatgacataccagtatgtgaaacaacaacaataaatacagaatcaaacatatcttataatgctataaatacaatagaagcaaacttacatagaactgaatcacaggaaagaaaactatgtgacgattcatgtgtttgcttcaataaaataccggctagtgtgtcaataaatgaagtattaaaatctttgtcatatctacgaaaaaatataaatgcacatgttgatgacactaacgatgactttcaagaaacgttaaaaacacaattagctagaaaacagaatgatcaaat

SEQ ID NO: 1062 - DNA, 598 bp, Plutella xylostella
cgtggcatattcacagaagaaattaaaacgaaaggcacaaccgtggagaaacaaataaattcagaagttaaatacattatggagagccaagatagatcctttgtagaagaattggaatctactgaaccgttgaatgcacgaacaccatcaatatattcagaagctacttatctatccaaatatggtaataatgaaagtaccagcgatgagggtagagaatccatgaaagctgttatagaacagacaatttacaataacatcgctgatagacttactgatgcagttttcaatcgtcagctaatcgctacaaaaagaaaaaaagaaaatggtaaaaaaactgaattacaccaaccagtaactttggtcggtgcctgcgaaaacacagacagtctttataacttatttctagatctgcttaaaaataccattagcgtttataaaatagctaccgactacgcacatgatgggcaaaacgagtcaaacactgctatcaaggaaaaaaaacccaaaaaggtgaacgctaaaaagaaatctgcatttggacgcaaaaccaaaggcaccatcaaaacaactaacaagactaaaaatactaatacaa

SEQ ID NO: 1063 - DNA, 598 bp, Plutella xylostella
attccctattgcagacccttaaagttatctgataccaattttattaaataccttcattgtaagtattggttccaaaatattctttaacatttactttgtataaatgttctttcccaagtaggttttccgaacataaaaaaaagtttatttaaatacagcaaggttaaacgggcgtaaaagacgatggtaatacattacgcctgtttatgtagattagtcccttgacctatttgttagggtctggacccatccgcaaggtcacatattagcggccggactcgggccgctttcattattatattgctcattttgtaggcccatcggtgggagctgtttcaacaattattcgggctcacctgccaagttttattttttctcacaacattcttttgaatatttgagagcatttcaagtagccgcaacaaatcgtaacaatctgtaaggtgaagaattctatgtagccaccactttttttcccaaagtttcacattaacaaattattatcttcagagctataagtgcaaattgaaaccctttaattaaataaagtccacaactacaagtgcaaaaaactttactgaattatgtgaaattaata

SEQ ID NO: 1064 - DNA, 598 bp, Plutella xylostella
tggtgaacacagtttcacaaaaaaaatgagaatatcatatcatttttggaaaatctatcaaaagccaaacattttgtatggaaaaaacgttcacaggtctctatggaagtaatttgttcatctttgattatctatgcattgtaatatgctattatttgtttgaaaagtggactttgttaattttagatgcattcctaatgatttaaactatgaataattatcaaaattctcacgttttttggctcatactgtcctcagttttcgtatactatttggggatttcaaaatatactgttttaaatttgtctttctagcaaaactagttaaaaggacgttcagtatatttttaatcattgatttatccttgaatggcattacggaaactgggcgactgtaaaatattgttgtgtaatcaagtttcactttaacgtgccttagtaatgttgctataaatataataaagtttgttaaaattatgtgtcacgcaaagatgttgtaatacgtactatatggagtgtcagtgcagaagtaacgtctcgacaaataaccattgacaaaagaataaagaggacttggcataaaaatcggtacttaaaaa

SEQ ID NO: 1065 - DNA, 597 bp, Plutella xylostella
atctgtgttgttagtgttccattaaaatgcattatgggattatcatattttcttttgacaaacagagtcgagtaaaattctatgagtatacttttctttatttgcttatgcggcattagacgttcattaaatactaagtagtaccaacctacattatttttgtcgttgtatgttgtatttacccaactacctaactgtaggctcgagtatattgctgggcacgagtaagtatatttcatttaaccttcgtcgttgaaggctttgtctcagtcagctaacaacaatttacccagtttctttgaataggcggtggatgctgcaacgtcggtagaccattgccgactaattgaaggtttaatgactttgaacgcaggcgcagctttaactaatgattgtttaccttttactttttatgtacgatgctaacactgattcaaaagacgaccaaggtccaaaggtgccagatatttgtttaaacacaactgaaaagtaataagtgcctagatgagttggaaaaaactaattaaatatttttttgataatttaatactctgtaatatagaagtagaaaaaaatctacgccgaatcatatttttt

SEQ ID NO: 1066 - DNA, 597 bp, Plutella xylostella
gttgcatggggtttcttggttgatggtgaaattctatacatcgcggcttattatcaggcgttttcgagggctgtgtagtgagtcaatagtaaatcacgatgatggtgttctagtgcatgtttgtctttgatctttttcatcgcaactttctttcgtaggtaggtacctactttaaatttttgttataaagttatttccctaaactacctgcgcatgctgtcattctgatatgtgaatatttgccatgtcatattgcatttggatcattttaattatattctgtttgatacaatatttttaatcattctcatcgtaactttgatctcttggtgcaacggctttgagttgggtttgattggttggttttgttcttttacgtaattagatagtttgaaggtttatctactctactagtcttgagttacttcaacgtttatttacttactaacatttttcactcctatgtcatatgcgtttccgatccaagctttacttttcttttttagaggaggattttatcgcaactttaaactcgtaataaaatactgacctaatgtactttcctttgttctacctgtaatgatggtaatataatat

SEQ ID NO: 1067 - DNA, 597 bp, Plutella xylostella
ccacgacgctcttccgatcttactggaaattaaactaacaagtgacaaataaaatgtatttgacagctgtcatagggccgaagatgaaatttattggtattcagaagttccacaatccacaattttaacacagtctacctatcgttcgctttcgcccgttactaggctcccgcaactctccaataaatagagtgaacgaaaaactagccaactgtgaacactccgctgcaactcagccgctgggaacagtttgcctgctgaggaggcaccctaaaaaactaaaaccgaaggacaaggatatgagtaaaacataacgattaatctcattattctgccagtaagaggtgactctaccgtgccctactctgcgcgccccggctcgtatttcatatgaggataccacgctatttatttattcaatatttcacgaacgataaaattgttgaggaatattaaataagatgaggaaataagttgttctcttcagggagttcacagtaaatgattcatcgggagaaggcattcatgttttatacctccttggtgggggttaataaattgaaaataatgtatcaagcgaattaaaaagtttctcga

SEQ ID NO: 1068 - DNA, 597 bp, Plutella xylostella
aaaacagcggtagcgtacacaatcaaaaacagaaatacagcaatgccgaatattctgatgccaacgatgatagcgactacgaaaattaccgtaactacaatactatgaataccaaaaacaagaaaggtaaaatggaaagtagcttctacggaaacatcacggccaaccgacaaaggcgacatgctgatgttcaaaatgccacctcagcgcccgtcgagaagccagcaggtgaagtggcgaaaaaggaggaagaagccgcaattaagcgacacatagataaacttaccactgatgaactggaacaattgttaagcacactttctgaagataaaaggaccttgctcgcgaagattattatggataacgataagaatgtcaatgcagctaaactgattgataatagtgatctgagaaaaagagaaataactaaaaaggccggtgcgatgaatgagaataacttaattgacagtaatcagctggatgaaaaagcccagggtggtgcagatatcagctctgatgtaactaatttgctaagtggtaatggaaccattaataatatggtagttgaagctgagaacataactgattctacccaat

SEQ ID NO: 1069 - DNA, 595 bp, Plutella xylostella
cacgcactatctgtggagtgttcatagtattgttatacctatgattaggtaataagtgggtaagtagactaatttgctttgattaggttataaatcgtagatgatgattgagatctatggaaataaataattttgtcttgctgaaactcgatcacaattaataatacttacccaaattataaccaaataccattctttaagtcttcttcgttaaatgaattttcgcagaacgttaatttaaatgagccataatcattataaatggcctactaagcataatcaccgttagtaaatacttttcaacaggtggctaacaagataaaaggaaaacaaagattttctttgaggctaaaatgggtgtggctgcaaataattatgcctccatgtgtgatgtaagttcatgcatttttttagaaatgtgacccaaagtattataaaaaacattgcatgttatgctaagtaatataatagcaaattattatttaaagtgcttagctacagggccgtaattacgagagtattaaatatgaaattacaacctaataatatacctggtaatactttgttaatatttgttaatctagaaataaaataa

SEQ ID NO: 1070 - DNA, 595 bp, Plutella xylostella
tttaaaatcggtaggcacatattaaataagaccagtgttgtgttacatcttacatctacttctctctaccgaccacttactactttgctaaacatcaatctttacttaatctagacgaatttattatttacttacttatttgtttataattttagctttttctgccaggaaattggtgttatagggttaagctactttatcattcttgctccgttatcctaccaaatctgacgattcttcaatctcaaaattgtttgctattctttcgttatacgtctataaaaattaaacgatttcactgattaccgattattcagtgcaattttacatacagttttcagaatataatatgagtataatactatatactttgtagtcaatttgtgctttttcttttgtgaaaattaattattaccctgggtttattaattttcttaaaacagtttcaaaactattcaaaacatggtgtatacttaaatgaagttccaagtctatatacgttacaagttacaatgctcattaagtaacacatgaaatgaagccaggtaggtgtattgcataactataatcgtatgtgaatttgattagaataatc

SEQ ID NO: 1071 - DNA, 591 bp, Plutella xylostella
ttcaaagcgtgacgtaacgtgtaaacaaactttaggtcaaatagttgagttaaaattgttttaaaataaaagactgtcacaaccgtgcggattttaagaactacataagaggtctctcatcaaatcataatgttataaatagacggatgacctatcactcggtaatgtgtttggcgtccgaagagaaaaagcgacggcatctttaaaaaaattggacctcagttttgtatcttaataatacaaattgtaaataatacaatgtttcccgagtgtcctgattatgtgaagcttctgccactagaccaaagaggcatgcatgtcatatttatgtatgtttcaatatggaacaggccgtgtgacttattataactaagtagattgtagtgcagatagcctaccgcgtcacgtaagggttatttatattagtgttgttagtgttccattaaaatgcattatgggattatcatattttcttttgacaaacagagtcgagtaaaattctatgagtatacttttctttatttgcttatgcggcattagacgttcattaaatactaagtagtaccaacctacattatttttgtcgttgta

SEQ ID NO: 1072 - DNA, 591 bp, Plutella xylostella
taaggagtatgtatggtgtgaaaatggaaccaaaatttaaaaaaatacttcaaaattcattaaacgaataataactttaaataatattgaagaaaactaagttctgaccttattaaaggacagacgatttcagtcccaaaaaacgggagttgcaattaaaccgaatttcccaatttctattcttaaaatagtaagttagtaatttataagtatctatcccgaaaaaatggaaaagtcccaaatgaaaaatggaaattttcccaaaagtctaaaattgcttgacgggagttttgtttatgaaaattctttcggtacataattcactccatttattttagtagattctatacctacttagcttttctactgcaattttgtaaaaaaagaacagtttgagatagggtctcgaactgaaaaaaacaagcattgaatgagggttggcaaagaaaatatttttataatatattttgcataagaaggcggggctaaatatatatatatatatgtgtggtttggtaagaaagcgtgtgattttcacctgtaatgtaatcgtgtaaagtgataagatctcggtatgaaataaggcttgtg

SEQ ID NO: 1073 - DNA, 590 bp, Plutella xylostella
cacgagagcttaggccctttaaaaattaaattaaaaattaaatttgtgaaacccatccaaaggagagttgttataatcatcggtccatttaagccacgtcatactatacaggctgttgtgaaagtgctagtttctacaattaagcatttcatttcttcaatttccaaaagtcgtagagcaaaaaatgcttatattgaccccctgagtcacactctttcggcttagtagttataccactttcgcaacaacctgtatttgaacatttaataaaaaaaaacgcttaaaaatttagatgacacaaaaatttatttgttaaggctgattttaccaaagcttgtttgtactttatttattgtattaaataggtaccacattgaatttattccttaaatatatatttcaaaagactgtttaaacattgtctagtgtagcaaacatactgcctggttgatcagaatatagataatataaatatagatcttaaaaccgctctcttcatagtgttaattggtatgagagttatacagggtgaggatttatcattggccttcttgacagttacacaaatattcaatttaataaataaatat

SEQ ID NO: 1074 - DNA, 586 bp, Plutella xylostella
accgcacaaccacctactgcagaagaatcaatcggaaaggatcgcacacaaagacaagcgtctctaaaatacaagaaacaaacagcggtcaaaccaaagtggggattttttggtaccattttccacctcatactagagcaagttaacgacacaaaaagcgcatacaaccagattaccgaattagtgaacaatcagttcacggacgataatgttgtcccgacagaagcagaccccaataacaatggaactacggagactccgaagatatcccgggcagaattcctgcggatacttgatcgaaatctgaagggtttggcgcgtctgcggaacctggagtggcgagaagcaaagaaggactcctgggagaatttgcagagatacaaagaagaaatattcaacgggaaaaaaactggaaaacgaagatagcattaaattaaattcattttaactacttcacataacttatttatttgtgtaacataaatatttaatgtaaaggaacctcaaggacggtgacacagtgggtatcttacccgataagttttacatttatctacctacctatatgtacttaaaaaaatctaag

SEQ ID NO: 1075 - DNA, 584 bp, Plutella xylostella
accgcgtcacgcaagggttctattagtgctgagttccattacttatcatttataggctcgagtatattgctgggtacgagtatattttatttaaccttcgtcgttgaaggctttgtctcagtcagctaacaacaatttacccagtttctttgaataggcggtggatgctgcaacgtcggtagaccattgccgactaattgaaggtttaatgactttgaacgcagctttaactaatgattgtttaccttttactttttatgtatgatgttaaagtacgaccaaggtccagagcggcagatatttgtttaaacacaataattttaagctccactgacgagtgaaacctagatgaatataaaaatactcgtaataatattatatacttactcttcacctcctggatcaaacagtttgccttgcgctagggtgtaaattgtgatacttattacgtattttcttgtctgtataaacataataggtatgcagggaacagggtcatcatcactttccaaattccatattttatacttaaatcagatcttagtataaccaaaaccaccgacggtaaatcatatatttttcca

SEQ ID NO: 1076 - DNA, 583 bp, Plutella xylostella
tttgttgggtatatctggttttagagtcctcaaaaggaaaaaaaaggtaggattacaacattttgacgagcatgtctgtgtaatgtaacgttcttacgaatggtacaatacaggcaaaagcatgataaaatgttcgtaaaggatgaacatcagagagcggctcgttgttctgttacaagtacctaaatgtctatcctcacctttataggatcactttgttgtctgtccgtttgcatgtctgtctgtctgtcaccaccttttttgtatttacttatttattcccaatctccgcaccgcaaagagccgaagtgaagcgcggccactctttacgatcttgagtcggttttttgtatttgctgctatcactataactatttatgaatgcaacattgaacgtaccattctactgtttattgagtgagaagatataatgagcttataataaggcacaaagcttattaaattatttatgatcgtgttttttgcttttagaggaccttttacttggtggcgaagaaagtcagtaaccaatgggaggttttcaaccatagacaacgtccatagacaaaacccgacaatagat

SEQ ID NO: 1077 - DNA, 582 bp, Plutella xylostella
atcgacgtatttagtttttaaaattcattaaacatcataaatatataatatttaatttatatactatattaaacttaagtattagctggtgaacaataatgtatgagaacaagcttaatcgggatcgctgtttaaggacaagttctattaaagttaaagctatacttcgatcagtgtaaatatattcgctatagacttaaagctattatatattaaaataggaaataaattacgttatcaacaaaaagtgagattaaacttaataatattagtacttatagccaactggactacactgctaaacgttgacaaaatatagtttaaaaaaagaatctcataaaaaaatcatcattgtttagtcagtgtaacagttgtccatagaataggttatagtacttaataataatactggaaatcgtagattctagaaacgaatattataaactgcacaactgtaactataaataaacaaaaatatatatctacgtcttcatcgtaataagcatttgcaattaaagtaaacctcaacataatattataaaactaaacgaattatatatacaatccatttatatgctttat

SEQ ID NO: 1078 - DNA, 572 bp, Plutella xylostella
gttcttaagcttgtcttgacagaaaagcaaaaggaaactttttgggaaacagatgaaaaattcacaatcacaaaatcttaaataaactctcaagttattaatagcttaccctttttatatttattaaatttatacaagttatcaaatgtaaaataagatgcgggtacccagaactttcaaggctaaggccagggtaaaaccgaaagcaaagaaaacccgaaagaacattacaagaagaaaaagatgtgtaactggaaatcatgtttcaattcgcgatctagatagcattaacaaagccattcacggaaataaatctaaccaaggtgacgaacgtacgtggaaactaattccaaaagattctaaagaagtatacaagttaaggcgcaagcgcgctcagcaagagaaagcacccagagaggaagataacatagatgaagagccaactgaagactcaagaaaaaacgatccagctcagcaacaaccaaatatgaaaaataaacttaaattcacaaaaaagaaacctagtacatctgcgggtgatggactgaaaaagaaacaagttcctaaagaaa

SEQ ID NO: 1079 - DNA, 570 bp, Plutella xylostella
atttcagactagacacccatattacaataaaatgataaaataaaaattcttaaacctaaaattaagatatcggtattgttcacaatgataaaaacttttgttatcattatggttatcatgattatttttgttattcagtatctaaaatatattagaatggatataaatgagttatctctagtcaaataacttaaattaacggctgaaattaaagctggaatcataagattcataagctaataaggcttgaattatatgcgccgatagaataaaaaatcacaaggacctactccttgtgactgtaatgtctaaagatttatataagtaccataaaaaaaatgttaagctatcgggccggtaaacatgatacagtaaaatgtataatattatgtaatttatctacttttaaaaacatgctatgttatttatactgctgttgaaatgactgcttaatattttacactgtacaacgtatatttttatgtatcgagagactaaggggaactgaatgtttatattttgtatatgatattaaaaaatgttattgtgaataaatattgttgcaaattt

SEQ ID NO: 1080 - DNA, 564 bp, Plutella xylostella
atagggcggctttttttcgtgtgcaatataccttataagtacgaatactctgttatcatcctgttagatataaaaagctataatttatgaagtgtgaagcaattatttcgattacataatgaaataaaaaagcagtcatcgccattttgaaaaggctcgggactcgggtttttcgaactcatatggacgaacgacgaagtgtcaacgtcataataaaatgttacacctatcacgtcgttcgttcgttcgtcaaaatgacttcgtgatagaccctcaggagaaagattaaattttacataaacttatgtaaaaaaaaacagacaattatagtattttctgtcggttgtgttaactgctggtgatccatattttaaataaatattttttttttccaaaattggctattggttatgagtataactttttataaataacaggcaatagtttataagaacaacgtcacagatctctgtatggacaattttacatgtaactttagtagaagtagtcaacatgaaatatgtatttacttagattacgacttagatatctttaaaattttaa

SEQ ID NO: 1081 - DNA, 556 bp, Plutella xylostella
tctccaagtacatcgactggatccagaacagcagcttgtaatttaatgaataaataagaatacggtttaatgcatttctgaatatttattgaagaaggagtgcggaagagtcagtgacgatggatcactcctatcgtaaaattcgtaaaccttacgtaaatgaaggatacctatagcttaaaaaaatgtttataattttatgagtcagtaggtattggcatggctcctggatgtgccaatcgaattctacgatatttatcaatcatcattaatcttacattaagctatttatcgatgtcacttaggtactcgtatagtgatgaaatacttaaagtcttttatttctacttctatgtcctaatcagacaaaaaaacaattatctgactgtaaataattatgataaaaatgtactttgtctcttgctaagtaaaagagattatgttataggtatgtgcttttaccgtttatttttgaaattgtaaacaactcattcctcaggagaaggttaggtgagctatgatggttaggtgttgagagatagattagatatattca

SEQ ID NO: 1082 - DNA, 555 bp, Plutella xylostella
caacaccgcaaatgcacttgatcactatcatctgtgatgaaactgcctttctatggtccatttatttacactcatgctgtaaataagctatactttcgtaaattctaaaaaaagtatctgaaatagacccataaagcttagatatacttaataataattaagtattgcctaattgtgccgaagcaactaaaaacgattcaaataaatatataaataactggtacatattaccaattaattgcacgcccctagactattactagacctatcccattagtttcttattagtaacggcactaaacattacacaccagtcatgtcgaaacagattagaaatagcatattataaatctcttatttacattgattagatatgtaaatcttatgtatagacaacgtaatattagcaatggtcaagttcaaactaatacaatttggaagagtgtatacttactagaacatgagaatactgaatttgaaagtaccacgattgtatcgaaaaaatatatctatgataccatctttctattctattcaataataataatataatat

SEQ ID NO: 1083 - DNA, 548 bp, Plutella xylostella
cccgcgcggaccaatcagcgaagggtctacgagcgtcgtcatcagagcacgcgctgcgattggccgaagcaagacgacggggtacctcgcttgatgcaatgcaaacaggggacgcactcaatgcaccgggcaaccgcgcgctaattcaagcggccctcggcagtttccactggcccccctacctgctcgcggtgtgggtgttggtcctattgctgacccacctcctccactgcgtcgtcaatatgctggagaagtcgttgcctaagatcagaaacgcgtgtcaatacctgcgcacccacgtagaagagtcctggacctctcccgaacagcagaacaaactgtaccccattgtactcgggctcgccacgtgtctcctgtactcagtgtactcactactgtactcagtcctcgcagtgtgtgcttgggccgtgcggccgctgtgtgcggaggaagatgtgcagagtgtggaggggcaggatgaggagaaacgacggtagttgtgtgtgtgggtttttttggtgaatatatttttgtgagatgggaaaaaa

SEQ ID NO: 1084 - DNA, 542 bp, Plutella xylostella
tagacatgggtaggtggtttgaattataaaagaaaactgcattttgaatttttgagctagacaagcttgttcatggttttgcgctgacaagccttcctcatttaaatggtggacctattgttgtggtttggacaaatgtatgaatgtgtacatttgactttgtgtgggcaatatagggttttgatttaagtgggtgtgtatacttggctattttatacatgtgatttgtttcgtatattttggaataatgaacgcattttgtgaacaatgaacggtttttttttcagttgcttttaaaaggatttttaaaagtggagtaagtatattgatgcttttaaaaatgaattatggacggtttgaaattagatttaaaatatagctcatttaggcagtttaaccgtcactctttaaattgcattaattacaaataagtcaaacaatgatgtcgattctgaaggcagaaattctaattttaacgctgtcaaactaaacaatttgctatactctaatttttaattccgcggaattctgacatttcatta

SEQ ID NO: 1085 - DNA, 533 bp, Plutella xylostella
tgcacgtaaggctgcactagaaaaacaaaaagcagatgcggaagcaaagaaaaaagaagaagaggaattaaaaagattggagcaagaggaaattgataagtacaagtgtacccctgaaaaaggtgctgactcagaaacggttaaaaaagaaggtaaagttattgatacaaagcaagatgttaaagttgaatcaaaagatattaaagacgaaaagaagctgaacgaaaaaaccggtagaacaaagaaagctaaaagtgtgcctaagaatgaaaaaaaagctgatggggtggacaaaggtactacaaaagtggttaaatcggatactaaaactcagacaaaaacagctgcgaagggtggaaaaccaacaattgcaagtgcaagtgcagaaaaaaagaaggaaccagctagacgcaaggaacctaagacttctagacgagaaactaaaaagggatctgcacctaaacctaataaatgaaattaactaacatattttaataaataaatatgaaagtaggcttgaaaataaatatttt

SEQ ID NO: 1086 - DNA, 533 bp, Plutella xylostella
ctaaacttatgttatctcgtatgtattatgatagacgactcaaacatgacaagccgggctaatgaacaaattgtagtaattttttatatatttccgaaaacatattttattgggattacagccaatgtaactgttgcgtatgtattactcctgtaaataaagaaactttacgaaaagggagaaggaagcagtaaggtattatacagagtgttgcaaatagggtatactaagccgaaacctagccggattagtataccctttttacaacagcctgtatattatatacagacctattacaattgcagcttgagttcattgtccattttcttattgtttctttctttgcgttccttataattatgagttttgagtgtaatagttttaatgttaagtgttaagttgcacttctgctggagttggtttgaaagaagttgagtaatttttcaccattgtttgacaaggaaattatggctaggtattgactatttctgtacgtttataaattaagcaaaataaacataaataatgttgca

SEQ ID NO: 1087 - DNA, 524 bp, Plutella xylostella
ctccgcgttggttctacttcagtgtgtattgaattgagcaaaacagtttgtaagtaatataaatatcactttacggagactttttctggaactggtaagtactctgttatatattacgagtaaaataattgccaggaagaaccgtataaaaatagaaaatatacatgtttaaaggatgaattactcgaaattggaccacggcgaggactgcgtttgctgcaagtgtgtttccggtctctttgtttcgaagaaacctgcagctaagtcaagggtcaccacagaaacaactacaggctgtgggtctatcagaagaacgggaagaaatcaggtcatcggtacagatccgattaattttaaaaataatcttgcaccacaaacgtctattacaaatgcgtcactccctcagccaaaggcatcagctttcaaaaagggaaagcgtgtaaagaagaagatcaaatttgaaaaggaaccaccaactttgaaggagattgtgcacatgcctgagcataaattaaagataaaat

SEQ ID NO: 1088 - DNA, 512 bp, Plutella xylostella
cagtacaaccagtacaatccgtacaaccagttcaacaaacagtacaacccttaccaaagggacggtaaagcttttctatacatttgattgtagataattagacatgtgtgatatcggaaagggcccttttaaaatattgggttcattctcatttgaagctgctaagggctggactagggactggagtaaaaaaatcaatcaatcagattagttgtcaatcatagccgtcagtcgggatgtctctttccatcttttcgtgcaccctatatttaattggggctattataataaactctgactgtgtacgttatgagaatttattgcggcaggtaactattagatatttgtgaaaaagttgtgtacagatacagaaaccctggaacagagaagacggaatcaacttagaaacgtttagataaaacatatttggtgtttcagaagtaatatcgcattatcgacgatgagctttttatggtagtttacagataaccctacttaaaaatacatcctaa

SEQ ID NO: 1089 - DNA, 503 bp, Plutella xylostella
aggagcaggagtagagtaggagcagtagaaaaaggagcagaacaggcacgaagaccattaacaatgtcgggaataaggataagtgttaattatgtgaaaactagatttgtataactatagagcggtgaaatgaagacgcaaagtgagaagaaatctctactatcgattgtcatctcaacgccatctatgatttattttgtaaaagtaagtaattattttaaaaagtaggtacctacttaagtaaaaaataaaattttaacaccttaaatacctacatatatattatttttaattatttcattttattttgagattctgtgtcttatgtctttaaagttggggaaagcaaagtagaatgggattgaactctccttgcaatagtattgagtaaaatgagataataaaaggtccattatacactcacgggcaatgaaaaagttccactcacaaaattccgacaccaaacgaccccaattttttcaaaatttttttaaaaatttgaa

SEQ ID NO: 1090 - DNA, 490 bp, Plutella xylostella
agcaggaacaggagcagtagaaaaaggagcagcaacaggcacgaagaccattaacaatgtcgggaataaggataagtgttaattatgtgaaaactagatttgtataactatagagcggtgaaatgaagacgcaaagtgagaagaaatctctactatcgattgtcatctcaacgccatctatgatttattttgtaaaagtaagtaattattttaaaaagtaggtacctacttaagtaaaaaataaaattttaacaccttaaatacctacatatatattatttttaattatttcattttattttgagattctgtgtcttatgtctttaaagttggggaaagcaaagtagaatgggattgaactctccttgcaatagtattgagtaaaatgagataataaaaggtccattatacactcacgggcaatgaaaaagttccactcacaaaattccgacaccaaacgaccccaattttttcaaaatttttttaaaaa

SEQ ID NO: 1091 - DNA, 483 bp, Plutella xylostella
ccacacacgacgctcttccgatctttgtgcttagctttaactatatgggatctgtctgcttccgctattgtcaaagtacttacctaaccaaaaacataaccttataaaatgcaagcaaaataatcaaacatcccactaacaatcctcctacactctcttttccgctgtcgcaatggatgtcgtatctatgttccactacttcacgtttgccatggtgtgctacatggcggtgaatgatgagaagcagatggagacacccgctccggtggagccagccccgtgcgagcgcggctggtgggccagcatggccaagagaagcgaatgccactaagaagtgaacatcacatatatatttctgacaattacagtccaagtaaaaatagtgatcctaaaaattggtttgataatgtaacagtaactgtctgttttgttagttaggtaattaattcatagtaaatacatatacaataccatcacaaaaaa

SEQ ID NO: 1092 - DNA, 475 bp, Plutella xylostella
ccacgcccacctcccgtccgtcagcagctacgtctccccttcgtactccagcctggccgctgccccagctctttccagctactctgccccggccttgtcaagctattctgccccagcgctctcaagttactctgcgcccgtcgtactcatcgtcatcgtacgcctccgccgccccggtcgtgagctacgtgccagcgtcgtactcagctctggctcacgcccccactcatgcagtgtacccgcctgcagtgtctagctacgtcgcccccgcagtatccagctactcccctctctcgacttacgcgtcgtccagctatgttgccccggctgctcggtctcctacgctccgtcagtgtcgtactctgctcctgcagcgcgctacgagacggttcgcagggtggtgaacgtgaacaaggtggtgtcggtccctcaagtggtgaaggtcaacaagctggtgtccgtgccccaagtggtg

SEQ ID NO: 1093 - DNA, 471 bp, Plutella xylostella
cggggtacctcgcttgatgcaatgcaaacaggggacgcactcaatgcaccgggcaaccgcgcgctaattcaagcggccctcggcagtttccactggcccccctacctgctggccgtgtgggtgttggtattgttgctgacccacctcctccattgtgtggttaatatgctggagaagtcgctgcctaagatcagaaacgcctgccaatacctgcgcacccacgtagaagagtcttggacgtctcccgaacaacagaacaaactgtaccccattgtactcgggctcgccacgtgtctcctgtactcagtgtactcactactgtactcagtcctcgcagtgtgtgcttgggccgtgcggccgctgtgtgcggaggaagatgtgcagagtgtggaggggcaggatgaggagaaacgacggtagttgtgtgtgtgggtttttttggtgaatatatttttgtgagatgggaaaaaa

SEQ ID NO: 1094 - DNA, 469 bp, Plutella xylostella
gcagcagtcgcagcagcagcaggggatgcagcagcagcagcagggccggcaggagaagttgcagcccattgttgattacttatttgtcagtctatctgttttgaacttgagggtagtaagtatccggggtatcctggctgctcggcgaaggtcggcgggtggtgaatgtgctggggcggctgctcgaaggtctggggcggatggtggatgtggaccacctgggctggctgctcctgctgcccgcacgcgttggggcacaggcaagggatcaggcagcaagcgctcagtgccagacaacacgggttgacgctacagcagtcgtcgccgcagtcgaaagaaaagcagagacccatccaggccttgtagcacggggcgctaataagacgtgataaaagttctccgtcgcgctcactcttgaggctgcgcgatgtgagtgagggcgatgcaaaacttttgtcacgtcttaact

SEQ ID NO: 1095 - DNA, 463 bp, Plutella xylostella
atacgtaagttgagagtagttaggtactatgtattattttgacgaccgaatggtgtagtggttagtgaccctgactgctatgccgaaggtcccgggttcgattccagatatattacaggctctgcctagtttggcgtcggatggctatgtgtgagatatccccacatattcactcgtgcactaatgaaacgacaccctgtatacaaattaactttttatatcgcttaaattaatttattatcatgagctttgtacctgtatttgtaatgaagttatgtataaggaaatgaacaaatctataactaaataattgacatattgtatttttgtacctactaggtattattgggagtttttactgcattcgtaggttaatcttccaaaatatttatttgtactcgcttttcgtagataccttctagcttaaaagtttttactttaaataataaaataaacgatttgt

SEQ ID NO: 1096 - DNA, 454 bp, Plutella xylostella
gcagcagtcgcagcagcagcaggggatgcagcagcagcagcagggccggcaggagaagttgcagcccattgttgattacttatttgtcagtctatctgttttgaacttgagggtagtaacccttgctcggcgaaggtcggcgggtggtgaatgtgctggggcggctgctcgaaggtctggggcggatggtggatgtggaccacctgagctggctgctcctgttgcccgcacgcgttggggcagagacaggggatcaggcagcaagcgctcagagccaaacaacacgggttgacgctgcagcagtcgtcgccgcagtcgaaagaaaagcagagacccatccaggccttgtagcacggggcgctaataagacgtgataaaagttctccgtcgcgctcactcttgaggctgcgcgatgtgagtgagggcgatgcaaaacttttgtcacgtcttaact

SEQ ID NO: 1097 - DNA, 452 bp, Plutella xylostella
cgaccaagcaactggttcacacagaaactccacaaacgcacagcagcagcgacaaaggctgaagaatctaccaccagtctatcaccgttttacaaaaacttgttgaaaaactcagaagaatcacatactggggataagagtcaacactgtccgtgtctcagcattttaaacgagagaagagacgcttttgcaatcgaaaatgttgatttacggcggaatattagacaaacatttgtgttgaatttgtttatgcggtgaagagttctgcgctcatgttattgctacagccgggacagaaacgaccatgtgtatgatttttatagaatacacaggttgccttcatattgtgtttttgcacaataattatgttttaattatcatattttatgatgtcttctgtgaaatggttttgataatattataccttttacactcacttttattttgtaaaa

SEQ ID NO: 1098 - DNA, 449 bp, Plutella xylostella
ttcaaggcgtaacatttgtctttcatagatttgtaattacactttaataaataaattacaataaagatttggtaccgagtgttcttagacatcgtaacaacatgtagagtagaatatttacaaaacgaggcttcactatttacaaaaatactagttcactttttactgtctcgttaatacagcagctaacgttcaaatatgcacgcgggccacggaacgcgggggacaacctctgtttgtatcactgaatatatgatgaattctactgctaacatattattagcattcacccacgcacagacggaaggtccactcacagttgactagaaaaatacagttcattttctattttccaaaaagtgtaaccattttgttagagataacaagagttcctaacagatcggaagagcacacgtctgaactccagtcacagcgatagatctcgtatg

SEQ ID NO: 1099 - DNA, 449 bp, Plutella xylostella
tttcttatgacagcatggtgacaaaattctattttgttgacaggtgacaccgaaaaatgaattcaacaataaaatttaccgaataaataaaacataaatacttacactctctaagctctaaaatatgaatatgtgtcttcaagatgattgttaagaagtctcaggtgaaccgaaccagtacaacccctatgatatgaaagcatcggacgatgcttatcttgagccatcttggaaaaatgttctgatcacaaaccacagcaaacaaaacttctacattcataactttgagtatccaagcatccaacaaattaaaaatgtcatcctttcaaattccattcttataattttggcgttactaattttgctcggctgactgcatagctgaggattagtttcaaggcagaagaataaagaaccaataacaaggatgatttgcatgacagctttga

SEQ ID NO: 1100 - DNA, 427 bp, Plutella xylostella
gtacggcgacgcgcagctccaacagaccaccaacaagagaagcatcctgtcgcgctaccgagacaaccccttcacccgccgcgccgaccacgccggggcggagttcaagatgatgtacgacgacatcgagaccaccgtactcactggaaaagaaaaacgcaatgtaaagaagaaaaagaaacacaaatcgtcgacggacgaattgagcacggacatgaatctgtggtctgcggaacaggacagctccaacatagagtctgacctgagggcgatcgacagcggccgccggcagctgaagccggggcgccggagacgcggcatccgggagagcgtgggcaggttcttccgatatgacaactcaagtctagagacgacggacaaagagagagcgagagaaagagtaaaatatagggaagatcctgcacca

SEQ ID NO: 1101 - DNA, 421 bp, Plutella xylostella
cctacatataacctagacctaactcctcgaggacccgttcagttccagccgtgcgacagcgcctcgccctcccagccctggtgctcgtggtggtcgtggtgctcgtggtgcactggcaccggcacgtggaccagcttctccacctccaccttcttgtaccgtggaccgggacatgcaccttggacacgtggtggtggtgcaccgtgtgtaccttgtagggcacgtggatcttcacgtgcttggtgtggtgtcctccaggcacgggggtggcgaccacggacacgaccacgagggcggcgagagcgagcttggcgtacatcttgcgaggagtcggctggactgatatcagctgctgagcgactgcttggagagatcggaagagcacacgtctgaactccagtcacagcgatagatcgcgtat

SEQ ID NO: 1102 - DNA, 405 bp, Plutella xylostella
accgctgcaagccgcgccccaacaagtgcaagccgaagaagaaacgccgctgctaaatgcaacaactgcagagagaaaaccaacggttgacacgagagttattaaggaaacatgccaacggagatgcaagcgtttccaccggcgccgcgcgagctgaggtggatagcaacttcaaacattgaacttttcggattgattaacataatgctaatctacgtcacatgtccaagtgttcgttacaaagtttatagtattttatcctgtaatttttatagtaatgaagtttttatagtcatgtctacgatatttttaaatttttggcggtctaaattattattagtcaaatttttaataaacatttttatgattataaagtcgtttatttagaaattaaatataggatag

SEQ ID NO: 1103 - DNA, 402 bp, Plutella xylostella
ccgccgcaaccaagcgcttcatagtctgcgagctcaaggccaccctcccggagatggcgccaccgcagcagcaagagaagtccgcggacaaatgctgtaagtgctgccttaaaaacatcaaacctccaatttgctgcaaatgtccgccgaaagagccccagtcgccaaaagaaccttcgtcaccacaagagcctcagcccttgaaacagcctgttgattcctatgaactaataaaggaagtattttctaataagctgtcccaggcccccaatatcccaccaatgaagggtactagttgctgtaatagatcgcgtaagcagtcgcctccaaagctgattgacgaaggttatgtggaaatgatactggagcagtttgaaaagaaggatgttaaatctgataggt

SEQ ID NO: 1104 - DNA, 1092 bp, Plutella xylostella
tccatagctatctaaccgagccgggattggttcatcaattatacgtcatctccatatagaattcttgacagatgtgtcaaaagtcaaccactaatacctacctggttaattggttatgctctaaccgactatggagaaattggcactttctgtcaatcaaaagtcaaagaactaatgctatattctacaaagtacagtaaacaatgtgagccgtgtaagcactctattacaaacatccggagcgacagtctaaagctgcgtacagaccggcccaacgaacgcctaacgatggatatttatcatacataatacagggcagattgcagccacgaatgtcaacaaaacccgttcgttggcgttcgtttggccggtctgtacgcagcttattgcaaacatccggagcgacagtctaatagttgtattcctcattttctccgttggcctcctcggggttgtatttgttttcatcctcgggttcttgcttgatctgcatgtccagcggggggagggagaactcggggtagtcatcagtgggttcctccttgaccttgacatgttcgggcttgaccttgggctccttcctctccttgtcccgtcgggagcgcttcttctccctctccttgtccttgtctctgtcgtccttgcggcggcgcggcgagcgcgagcgggagcggcggcggcggcgggatccgctgccattctcctcctcagcgcgtcgctcgcggcggtgcgagcgcgactcggagcggcgcttggagcgcgagcgggagcgacgacgcgtagacgatggtgcggggtcccggcgcgaggcgcgcgcgcggtcgtcccgcgagcgctgctcgaggcggtaccgctcgcgctcgcgctcgttgtcctcgcgccccgagtgcttgatgttcacgtcggagccgccgcgccgggtgccgccgaggccgccgccgagtctccgtggcagccaccccttcacggtccgggctcgctcgacgtccaccaacacgcgcttgccgtcgatcttcttgccgtcggcgtgcttgtacgcggctagtataaagccactatctcggatgcggtctattacggctgggtcgagtt

SEQ ID NO: 1105 - DNA, 416 bp, Plutella xylostella
gaaaatcatcagtgtttggggaaactaataagatggcgcacttgcagccttgtagcgtttaacggctgcactaaccggaccacgtctccagtggactccaccatgggatatgcgcggtagtgctcaaccaacgacacgaggtccgggaactgctggccgccccctatgtcgtataaccctccgtggcgacggatgatgatgtgcgtcacgtggtccctcgtccgcaccgacactacgaagtctcccggctgtgattgggattcgcggacgaggaatgagccgtttttgccgttttctagcatcattcgctccgcctcttttgcagtcagctggccgtggtaccaccgctctgtggtcggatcagcgcagtttagcggcgattttaaccggatgatgctgccgctcttttctcttag

SEQ ID NO: 1106 - DNA, 1654 bp, Plutella xylostella
aatcggcacgtttaatacaacgagatgtgtcgtggcttgcgcaacaacgctctgaaacttagtttttcgtcgtaggaccggttttttgatctgtggtcaactttaaccattagtcaagtcacgtgttaagcatgacagcttttaattttaactaagtgccaacttcttcatagtgggttagagcataaccagagattgacttttgacacatttctcaagaatttaatatggagatgacgtataattgatcaacctttccctggttacgagttaaccgaatattgtaaaattggagctaattattgttatttttgaccaatgttggtaactacggatcaaaaaaactggtccttatagagtgagcctccagtatccatgtttacaggtcaagcttcactcacacccggctggcctctatgttgggtatgttgccgagcccctgggaggccctggaccagtagtagtagggggggccgggcgagaagcagtacttctggctgaggggagccgtttccgtccagtacatcaggtagaagttgcacatctcgtcttcgtttgttgcgccaatgctgacttggtggtcattatcattctgcatggtgcaacgggcggctaggacgtctccagccactatgggggtctggtcttcaatggagtagaacatctgtggcagctgagggttctttttgccaagaagccgccattttgcgtcgctgccggtgcctgtcaccacgtagcctgatactaccttgcccagtctatgcgtgtgagtgcggaaggcgaacgggtgtatgactttatcttcgaacacggtgcaggccacctccatgtgctcggtggagtgcgccggcaccgcgccgcccgtgcccagaaggaacacgccggcttggcgcggcatttgtgttttagtgtatttcaaaaacactccagagttgtctaatttgccagctggaaacttggacatgtagtgcacctgcagcacgaggtacttgatctcggagtcctgccccaccaggaagccgacgtcttcgggcagggtgaggctgggggcgtcccgcgcccacgcgtacactatctgagatccagactggcacggcttgccggacttgtaggaggggtctttcggccccgccgccatctcgccacagtcccaaacagcatcatttctgcccggctcggtgcatccgtagagtagcatgtggtgcgcagtgtgcatggtagcgttaggctcaaagccaactatgtaatagttcttgttagggttgatcctgattggagtgcataagtagagttcatcccgactggggtaaacattcggcatcaacaagtcaaatttatcgacttcgatctttttccgatagcaattagcttcaattatgaatagaacagtaaggaaaatgttaactagccaccacattttaggatattaatagaagttaacactaaagtattttaaaagtaagagccaagatacggcgaaaatatttttcttgcacgcgaaataaatgccacttaaaataagcgactgatactttgtgtcaaagttagaacactgatttgatttggcgtttcgtttaatttttatttgaaaacaaatgaagcacggttatcgttatcagtgtccgccaacaaacttgaaccaactcgatcgata

SEQ ID NO: 1107 - DNA, 2064 bp, Plutella xylostella
ctcgtatgatattgatgatgatgatgattgaatgattttatctgataaaacacaacaaaaatgataaacggttcatgatgatgctgatttacttacctgcctatttactggttttttcataaatggagggaatggtacaaacggctaggtagtggcagaaatatagtttagagagcatcaacttacaaacattaattattttatcttatccaacgtttagattttaacaagtgtgaggatggcttggtcagcatcactaggtaaatacacaaacgcaacttttatttttagaacttcaaattactcatacccacctaattcataaatctgtgtctaatggatccaaaacaatgacctgatcactccaagcatgaaccctcacaagtcaaaatccacccttactccctacgctccactaatgtcttctcttgtcgcgtcgcggcgggcagaccctgtcccgggcgaggtatagcgcgaccgccagcccggccagcagcagcgccgccaccgagcagccgactgccactgccttcagccgagcgtactccggcacatggagcgacgccacgccggcgccgccggacacgcactccacgcgcagccagtagcgctccccgtcctctacctctggaatcagcatgtaattctccaccgtagacttgctagcgactaatctcctgtcggcgcccgcgtagcacctgatggtgcaccgggactcgtccatggggtcccggtcccagcgcacgagcgcgccctcgtcgatcagtcgcacggagacctccagctcgtcctgggctcctggtgcctgcgtcaccggcaccgcgtggaacgcctcctctgcgcccacgatctctgtgtctaaagtcctaacaaacagcgacttgctgaacatgccgtcgcccaggtggtcctgcgagagcacccgcagctcgtactccgtgccgggccgcaggttcaccagcgtggcctccgtgacgtcacgcgacaggatcttcatggtacgccactcgtgcacggcgcgctcgcggtaccatatgttatagtctatctcgagacctttgtggccaggcacccaagtcagatgaatggaatccacggacggcaaagcgctaaggttgtacggagctctcggaggcacgttctcaatcagcagctcggcctcagcgcgcagggtgctggcctcgttccggagctcacacacgtagatgccgcggtcctccaccaccacgtccgagatggtgaggttgccgccgtccaggtagtagcggcctggagccagctccgacccgtctttccggacccactcaatagcgggcgccttctcatcagtgtaggcggcggcacacggcagcgtgatgctggctccgagcctggtgaggtacagcggcagcgggcggatggccagcgtggggggccgctggactcgcaccttcaccagcggcgacgggccttccgaacccagcgagttgtagggagtgcacgagtaggagccttcgtgggattcgtctaccacattaaacagtagactgccgttccgactgtagaagactccctgcacattgtaggggtcgaagaggaagccgtccttctcccagcgcaggttggtgagcggcgggttggcgctgaagtggcagtccaggctcgccgggcgcccgtgcaggaggtagcgctctttcggtgcgtacaccactttggctttatattgcacgtctagaaacgcgctagcgctctgcacctgtccgtctgtgtcctggacatggcactcgtactccccagggtcagtgctctccgccttcctgatgaccagactcccgttctccaccagctcagctcgcgtcgccagctccgggatagcctcgataggcgtgccgtccttgtaccactgcacaatggtctctaaattcttcggcatacactcgaactcagcgcgctccccctccaagacagttgagttcattggaggtgtgactataagattgcttccatcaacatccaagtagtaaaacgtgccgttgttcctcgccggcggggtcctattcgggaacgtgactcggcagcggtaca

SEQ ID NO: 1108 - DNA, 688 bp, Plutella xylostella
gcgcacgcggacccgcacgaccagtgcacgcgcgtggccgtggtggatgtgcaggggacggtttggggtttggcggccgggcagtagcatacttgcgtgacagtctcctggcactcatcacacggtccctcgtgacagtccttgccacactcgtgctcgccgcagttcagcttgcggcgacaccggccggaacacagctgcgacagcttgctgctgcagaggactgaacgagtctctgcgccgcacccgcattgtcaataacactgctcatagcccacttcctaatacacctgagatgcagcacgtgatagcagtttccgcacgaccacaccgagtcggtctgcttgacgcgctcgcagcacaccaggcactccagcgtgcccttgtccagctgctccgagagccgctcccgctgcgtcaggtctgatgcacctgcatgatcattgtgtgcgttgctgttcttactcttgtttctcattggactggaggccccttggactttactgcccctctcctgtcctttgctggccctttcctccctgtatggcatgtagttactagcatactgttcatcatccatgacatttctctccgaccgtagtcgctggcttcctgcccagttacgattattactcagaggaccttctgaccccttgctattccttggatcctgactctttctatctga

SEQ ID NO: 1109 - DNA, 1354 bp, Plutella xylostella
gacatcgtaacaccttttacatcacatcgtgatagatatctcatagtcatttcatgccttcgatataaaatcctcgtatttataaagcaagtagctgagtgtgtataaacagatcgccgcgcggcccgaccgcgccacagactagtctaacacagaaaccaaaatcgattatggtaacaaaactagctaaaatacaaaaaagagaatttgattcgcacacaactttcataaaaatcatgagctcgcactaaacctaataagtcttacctctccgcacaagccaggctcgcttcgggtcgctccagtcgttttataataaaattggcacattacataaaggaatcacaacataaaaggtgaacacaactaaaaatacgatggaccttgggcccgggagtgcgacgggggcggtcgctagtagaccttgatgtactgcttgccgtggctgctgacgtcacgcgccgtgtcgggcagcgtctcgaacagcaccaccaggtagccgtcgggcgtgagcgccacgtcgctgggccggtccttgtcgtccagccccggcgacttgaggtccacggcccacaggtagcgcaggtcgctcgtgaacaccagcacgcggtggttcttggagtcggccacgatcacgcggccctcgtcgtccgtcacgatgcccgagggccggttgagctcggccacgcccgcgccctcgcgccccacgccgtggatcaccttgctgagcgtggggtccaccatgatgagccggtggttctcgaagtcggacacgatgatgttgccgcccgtggtgaagcacacgccgcgcggggtggtcggccccttcagcagcttggcggggttcgcgccctcgaacaccagcttggtgatgtaggtgccgtcgctggtgaacagctggatgcggtggttgcgcgtgtccgtcaccaccaggttgcccagcgagttggcggccacgtcccacgggtactggaactggccgcactccttgccgaacgagccgaacttgaggatgaagtgtccggcggacgtgaacacctgcacgcggtggttgtccttgtcgatgacgatgatgcggccgaacacgtccgtggtgatgccggcgggcaggtcgaactcgcccgggcccgtgcccttgcagccgaacatgctgcggaactcgccgcggctgctgaagatctggatgcggttgttgcggcggtccgccacgatgatgttgccgtcgcggtccacgcacagcccccagggccgcgacacctcgccctcgccctgcccctcgcgcccgaacgacagcacgggcacgccgggcaccgcgctgcgcgtgggcttcaccgtcaccgccatccagtagccg

SEQ ID NO: 1110 - DNA, 867 bp, Plutella xylostella
cggctgatgaggcagcgtattatggaggccgtgcgggggcggcgcggggggcgtcggcgcgggcggcggggtcggctgttgcacctggtggtgtgtgtgcggcgcgtggtactggctgggcgcgtggtactgcggctgcggctggtgttgcggcgcgtggtattgtggttgctgcaggatggccgcgtcctctcgcgtcattgttctgtaccccatatcctcatcataggtcgtgtgctggttgttgtgtccgttgtagggcgcgggcgcgggcggcggcgccggcgtgcccggctgcttgttcgctaatacctcgagcgtgtgcatcatggcgcgcgcgaagctgtcggcgtcctcgcggcacgagaagttgagtccgtacacgtggcgcgcgtcccgccactggtggaacgtggccgtcgcctggttgtacttgaggccgcggacgatgccgcagtttattactacctcgtggtcgttgagcttccgtccgacgacgcggaaggtgttgtgttgcgtgtggtggtagatgtgcaccttggagagcccgcacgaggtccctgaggggacccagcgcttctgcccgtcgtcgtacaccatgactgaggcgcgcgcgctgcttattgattgctcgctcattttggaagcaattatcctttgtattaactatgtaaacgcactaaagcacatcacaccacaatagttcacttataaacagcatattctcactgatacaacaacgtacaatgaatcattattattttatcggcgcaaaaacacttcccggacaccacgaaaggtagccatttttgacaaaaatcgctttttcatttttcacatcccccgaatcccgattttggaagacgg

SEQ ID NO: 1111 - DNA, 1117 bp, Plutella xylostella
ctgctgcccggcggcggcgcgcccgagtccgccgccgccgccgcgctcgcccgcgagagtatatctgcccctggtgctgatcattactgtctgagagcgtatgcggatgcgctggaggtcgtgccgtacacgcttgctgagaatgctggtctgaacgcgatcgagacggtgacggagctgcgcgcggcgcacgcggcggcggcgggcggcgcggcgggcgcgggcgtgaacgtgcggcgcggccgcgtcaccgacatgcgccaggagagcgtgctgcagccgctgcacgtcaccgcctctgcgctcgccttgtccactgagaccgtgcgcgctatactcaagattgacgatatcataaacaccttgaactaaccggattctcacgctttttgttataaaagtattaatattttagttttcacactatacgagcttacaatattaacagtctccactccattgcgggctcaatgattcatgcaaagctacgagtatctctacactatgcaaaatgctatgtgatgttttcacaattttattctttaggttatagaatgctagccattaacttatattgtatggaattaaataaataactaataaatctaattcttgtttttcttcttaccccctgtcatacctagggaatacaagcttgcaaaattaactttaaatgtggttgagattatataggtggatatgtattatctaagatactatcgaccacaaggataaggttacaaacaggtggcttgtattgaaaggtttttatctcttatgtttatttatctatagctatcatcatcagccaatattaatccactgctcacaaggcctttcccaaggagagccacaacactcggtcctctttttaatccgcccatcttgggccatctaaatagcaacttttccctagatgattgtctgagggcccaagtcatagagaaaataacattacatgtagtgctgaattctgtcattctatttcagaaagaaagagacagtgatttacctttgttcccagccagtcacacctcaaccagtcacactgttactcgttgggaattttatgttcaaaattcccatcagtccacactctgttactcgttgaaacacc

SEQ ID NO: 1112 - DNA, 501 bp, Plutella xylostella
ttcccacacggtggtcccgaggtacgcctcggcgatctgcttcatcttcgtcagcaccatgctgctgatctcctctggagcgaaccgctttgtctctcctttgtattcaacctggatcttcggcttgcctccgtcgctgactaccttgaagggccagtgcttcatgtctgcttgtatcttggggtcgtcgaacttgcgtccgatgagtctcttggcgtcgaacacggtgttgttggggttcagcgccacctggttcttcgccgcatctccgatgagccgctccgtgtccgtgaaagccacataagatggagtagtcctgttgccctggtcgttcgcgatgatttccacgtttccgtgctgccacactcccacacacgaatacgtcgttccaagatcaattcctacagctggcattttgttattcttggttttaattcgcttcgtaaataactcgtagcgtttccgctaaacttcttcactcctcttttcgctttgatttct

SEQ ID NO: 1113 - DNA, 4111 bp, Plutella xylostella
tttttttttttgctctaaaataatttattttaccttttgtattctgtttataaaacaatcgcttttattctagcttaaagttatcatggcgttcgttctacaattatgttgttacaatactctctcgtttatttacattattctatacaaaacaaactagtcggtaattaaatttgtaggtaggcaagtgtagtgaatgtcattcgattttattttttatcttgcgtagttgatgttgggatatcggttggtactctaatttaaattacatacacacttcttcactctacgctacgcaatgcgcaccggatattgttttgaatcggactgaaatcggatcaacacagattttcgcaatggtatttcaaatagagctcttactcttacgtatcaagaatcgttaaaaagtgtaattacgttcgacgagattcactgaggctattaaataaattaacaaggaaagtttccccttattaatctacatacttaaatcagtccaacttcccactccgagatactcgtaatacagtagttttgctattattattactacgaaccgtcgacaaaataaatttaataaataacaagtgaatgtaaatactaactgaatagttaaaattagtttaactgaaatgcattctcccactttcatcactaacacagctttaaaatatttacttataccaatactgctttttagaatttattttacttatagttataggtacattattgctttcatttttcgaatcaatgcgatcaagttattctataaataatttattttatcatacaataagcatgcttcacaaggcactattctagcgagacttccaacatacaacttactcaaccaccgacgtcacgtctacgacaaacaacttctactaaattcgggttcaaattccgaaaatacaagaaacttattaaattatccagtgttcaaataaaacaagttgatttttctcataataattaactccatcttgtcattgcaacaaatataatgatcagaataacacagcttctcttaaaaccttgaggttatacctatcatggtggatttgaatattcaaaaacacctaaattttagaccaaagcaaatttaatataatgaaggaaacacattaacaactgcatgtgtgggtcaacaccatccttaaagcgtttaagctttcgttatgtgataaaaaagcaactccatacaaaacttacgcttaaagctaacttggcgtttgtattgctctgtattttaacctcagaaatacatacttagaacactccaacagagcggatataaataaaaaatggttcgtaaaagtatatcgcttgccgcccgtacctactaccattttcagggatgaaaactttggtgatacactttattctcgtgtgggcaaggaactgcaatgaatttattttgtagaaatacacttgaaatacataaaaacattatttacttggcttgtttattccactcgagttatgctttattggagtaattctaaggatttaagtaactaaacaccacactaataaattcttcgcccactcaacagtacccgatgaacctatcagtgtatcattaaacaattatcaggtaatatctaaccttagtacttaataagtattttcataacgcaataatagaacaaagttgtatttacactacctatttagttactacttgcctgctatttgtcgatttttccaatgaacttttaacttcattcgttgatcgaaaaaatcgagcgacgcacggcctgaccctccaatataacattcaacattacatttaacaccaacaataactggtatcacagcatttcatatttgtgtcatcatgtccgtagttccgtagttgcatcaaatttacaaacaaaactctccaacctacaatttatagtctttgcaaccacatattcacgtattctacaactgtagtgaagcattattccaacgtaatgaagattttacaaactcaaatcaaacacgattgatcagtcagtaattgttagacattctttttacttaggtacatcgattttgttataaacttatttacctataatgggaacacgattcttatattttatcgattttatcaaacgacaaagaaaaacatcaataataataataatttgtcatccaaaattttaatatttcagaaattgagcaagcgacacttggataggataaactgtgggagaaatcaaaaatggataagtaaataatatttttttaaaataccaatatgcttttgccatcaactgtaaaccttaatgtaaccaaaaactaaatatttataagtaagtagtcatgtttgagctagattggaattaagggtgagaccaaacaagcgttaattttggtcgcaacacacacaacaattttggtcgcacttcgctcctcccgtcctcgtgaacactgttaaatgtcagtacataacttaaaaaataactctcgtttggcctcacccgagtgacaaaaacttatagttcagttctgagtccgggggtggtgcgctctggggtggtgctatcaccgcagcgacgccgccagctcgttggacatggagttgtgctcactgctgttcagactcttggagcattgcatttgtcgcacctcccacgccttcatggcgctcttgtacttctcaaactcgtggcaccagtctgagtacacttgtttgtactcatgcgacttgctcggttgagtacatctgtgcatatcaatctccaggttgtaggtggcgagcagcgtgggcccgaagtagcactcgtagcggccgccgtccgccgccgccacggccagcagcaccagcccgcgctctgacgtctccagcacgtggtcggagttgacagaaattttatagcgtcccttctcccgggaatggtggtaccacaccacgtgctgatccctcagcgcatcaggggttctggcgaaggcagccaggtgcacgctctgcccgtagcccgcccggatggtcctctgaggcgcgctggcctcgcagattgccggcgtggagttagtggcgtcgtggaggagaccaggcgagtatggtctacatgcatccgcttctttgtcccacccgcagtaagggtctagcacgcagcggacgcaactgtcgtacctgtgagagcaggctcgtaggggcagctgtcgtatccggttgtctgtggtgacgtatagtgagtgcatttgccgggagatggccatggcccggacgggctcgttgtcggccgcgcgccatatgtccgccacgcgcgccgcgccgcccgaccactgcactatcttgtagatctcaccggcatttgtaccagcgtagtacactgtgtaagtgatgtctgctcccaacatgtcgacaaactgtttgtcgaccaccaaagaggtcagcaccaaatctcttcggaagaacacaggggcgtccccctcctgtcgcaccgccgagtccatcagcgggtgagatctgatgaagttaagcacgttgtctgggagtgcggcggtgtcgttgacgcaggtgccggggcgcggctccggcacgcgggccctcaggactggcagccacgccgagctcgacgtagcctgttccttgaacctgccggcgaaggcctcgtgtatatcctccatggagtaggtgcagatggcggacccggccagcccgtcgctggcgccggtcgtgaacgccgcgtagaaccgggacgcgtcgcccgggatctggtacacactctgaatttcatcaaagtagaacgggaactccccaggtatgctgcagttcagtctggccttcaagtaagtggcccaattctggctcagtatgtgtttcccccccgtgtcctgcttgcacacacgagccacacgggagtacaccgctttaccacagttcatgaactccacggcggtttcgcggaaaaaaaacaacacatgctccccaacgtcgaaggaacccacgaagttggttttatccaaccatttcgagtcatacttcagcgttctcttaaagctgtactctttcagtcccgtcctggagttgaacaggtcattcctgaagatgactgggtcagccttcgtgaactctgcattagtaccggcatatagcgccgggagtccc

SEQ ID NO: 1114 - DNA, 1440 bp, Plutella xylostella
ccccgcctcgcccgactcgctggacgacacggagccgagcgggctgcgcgcgtcctccgcctcgcccgcccacgcgcccgcctcgtcctcgccccacatctgctggcgcagcagctccttgtgctcggtgcggaacaccaccagcttctccgtgtgcagcgtgctgagcgtgcgcaggtcgggcagcgtgtccatgagctcgcgcaggaagccgggccgctcggggcggttctgcgccaccacggtctgcaggcaggcgcgcaggcgctggtgcatgcgcgccaccagctccgtgttgcgcaggccgggccggtcgggcgtgatcagcacgatggcgcagaacagcccgatctcagcgtccgtgaggttcatggagttgatgcgctccgcgaacttgaacgtggagtcgacgaggaagcgcgcgttggcgccgctctggatggagtcgcggcgcatgagctgcccgttgaggcagatgatggagttgagcggcgcgtcgaacatgcagatgaggcgcacgaacagcgcgtcgaacagcccgctcttgagcagcgtgaacttgtcgtcctgcgtgagcagctggaagccggggatgaggccggcgaagtcgatgacgccgcggatcacgtgcgcgaaccgctgcgagaactccttctccgactgcagctccggcgcggggttcagcgggcacgccagggtgggctgcgagtaggtggggcagtcctgcgcgcgcgcccgcatggcgcgcacggtgtcgcgcgtgaactcgcaggtgtcgcggtgcgcgcgcagcacgcgggccagcaggcgcggcgcgtcgtccagctcggccgcggccgcctgctcgtgcgcgcgcgacgacgacgactgctgcatggccgccaggatgcgcgccttctcgcgcttcggcacgcgcccgaaccgcaccgcatctctgctcatgcccacggcgatgcatttcttgaggcggcaatattggcacctattgcggttgatccgcaggatggagcactgctggttcttggtgcagggccggtactggatcttctgttgtatggagcggcggaagaagcccttgcacccctcgcaggaatgtactccgtagtggaagccgctggccttgtctccgcacacgcggcacagcaccgtcgtgccgtcgaactctatgtgcaggtcgggctcggccgcggggctcgccggcgccgcgtagtgcccgtagctgctgtccggggacatcactaatgccatttgttcctctgttcacacttcaccacactagccacatccaggggcacgtcactccgcatgcacgcgcggatatggggcagcgggcggcgggatgaaggtcgtcactgagtgctgccacacgcgtgcgtctcgctcgggctccagcgaccgactgaacgactccgcgcgaccgctcgcgcccgccgaccgcac

SEQ ID NO: 1115 - DNA, 954 bp, Plutella xylostella
cctgaccaccttgagcttccctgacttttccctgactatccctgactttccagaaagtggacaccctgttaacgtatgcatcccttagaataaggagccacagttcagaaactccaactctatactgcatccgattcccattcatacattttctcctatggtcattcaatcaattcatttaacacaacataatcattatcacgctgagagtttcccaatcctgtcgtccagtttcttgatctctctctgaaggctgtcgacgttgtgtgcgaacacttcctggacaccctgcagtagctccttgttgttttggacgcctcccgcgatgctcgcttgcagggtttctagctccatcagggatttgctgaagttgctcgcttggttgtgaagtgactcgagcgcctccatccgctccagtatctccgagtgtgagatgccgtcgatctgtttcagcagcttgtgtagctcattcaccttagcatcagcctccgggtcagccggcctaacagcggccttcagtgcgtcgacattagcgagtagtgacgtcactctcgcgtcggcggccgcgagctcgccgggacgcagcagcgacgcctgcgcggccagggatgctgctgcgccgcagagagtcgcctctccggtggcggcctgcagtctccggaacgcctcctcgtcgcgcacgcccgccgcctgctccagcttatgtaatctgtgttcaagttgcgctatcctggtggtctgcgcgagcgccacctcgggccgcagcttcaggtgagtcaccgccatctcacccgccttcttcttgctgccctttgataagtattccttcaatttctcagccttaggatctatttgctctccctcgtccagcttcagttcctccagcagcttcttggtggagttgatctgcgccgccaactttgtgtgctcgtccttttcactctcactagcttt

SEQ ID NO: 1116 - DNA, 1564 bp, Plutella xylostella
cattgaaaacaacagtatcctaattcacttttattagctgaatacagaatctagccttggagtgaacaggaaaacaattttggaatgtaacgtctcgttactgggctattgcattatttacataaatatatttcacatcacaaatggcggaagtttcaagcgatatcacacaataaatagtaacatctcgatttacaacagattttgattatacatataatttgaacacatgtcaacaatttgtgcacaaaaataactttagctaaatattgttagagtaatatttgaaagtttgaagcaccaaatttaaccgctcggtgcattctagagtacaacatgaaaatatatacacaagtcggtcggtattcagcattgcgacggccgttacttaagatttaaatgtttttatataattttgcacatgatcgtaatacattataataaactattaacaacttactattaaacagtattatcttacatagtatggccgcggctacccggcgcggcggagcgcgtcggtggcgacatagtgtacgcgaggggtgtcgtgtcgcgttgtcgtgtattgtagtgtagtgtcctaatggcgggagtcacgcgggtagaactcggcgaggatggaggcggggatacgcttcaacatctccttcgggaagatacgcagcagctgccagccaatgtccagggactcgaacactgtgcggttctcgtagttaccctgggagatgaagttcttctcgaacttggtgaggaactcgaggtagagcaagtcatcaggggtgagcgcctcctcaccgacgacggccttcatcgcctgcacgtctttaccgatggcgtagcaagcgtacagctggttagagacatcagagtggtccttacgggtcatgccctcaccgatggcagacttcatcaaacgtgacagagagggcagtacgttcactggagggtagatctgtctgttgtggagctgacggtctacgtagatctgtccttcggtaatataaccagtcaagtcaggaataggatgggtgatgtcatcgttaggcatagtaagaatggggatctgagtgatggatccgttcctgccctctacacgtccagctcgctcgtagatggtggccaaatccgtgtacatgtaacctgggaaaccacgacgtccgggcacctcctcacgggcggcggacacctcacgcagagcctcggcgtatgaggacatgtcagtcaagatgaccaacacgtgtttctcgcactggtaggccaagaactcggcagcagtcaaagccagacggggtgtgataattctctcaatggtggggtcattggccaagttcaagaagaggcacacgttctccatagaaccgttctcttcgaagtcctgtttgaagaatcgggcggtttccatgttcacacccatagcggcgaatacgatggcgaagttgtcctcgtggtcatccaacacagatttgccggggatcttaacaagaccggcttgtctacagatctgggcggcaatttcgttgtgaggcagaccagcggccgagaagatggggatcttctgacc

SEQ ID NO: 1117 - DNA, 2637 bp, Plutella xylostella
gccgcgatcaaaataatctattcaggtcaagctagacctaaatattgttttcaaactgaatttacaaaactcttatttgtgtatttttaacttggagaaatattgtttgaccactaagaactgatattcttcaaactgctgcacatgggccttggtcagtgttgtgtgaaggtctttgaggattccttggttaggtataggcctcacgggacttcacaccactctgccctcggcctgtctcttcctggcactgcactgtctgtcctggtctccactcgcgaaaacgttccacagttaattattttttggcagatacaaaagatacatcttattacaatttttatcaccatttctgataggctccataagagaaaccctcaactgtactgggtttccttcatcatgagagcacattcacctccgaatgcaaccattaccttttctacacaattaaagatacacacaagctaggtttccttagaagccagtgacagctttgatggccttctcttcgtcgtagggcgtcatttgcctgttggagtggaactccatggtgaaggaagcgagccccgagctgagggaccgcagcgccgacgagtagccaagcagctctgatagcggtgctaagcactctatcaccttgtcccccctccgcacgtgaacctgctgcaggtcggcgcggcgccgcgtgaggtcggccagcacgcgcgccgagtgcgactccggcaccaccacctccagagacatcaccggctccaggaggatggactcggcttcggagaatacctttcgaaggcattgcacgacggcggcagacacaaccgaatctgaagtcccgcgtcccacctccagccagtgaagagtcacctgcacatccaccatcttgcagcctagtttgggtccgtgcagcagggccgtggagacgccttgctttacagctgtcatgtgacgcgtccatacatgcgcgagattcgccgcactctccggtgatttgtttaacctcaaaaccttatcagccggtactcctttgacagttttggctgacatggtgacattgaccatctgcttctggctgccgatcttccgctccagcacgaagttcctctgggcggcgcccagcagcgtctcccggtacgctatctggagaggacccagctccacgtcgatcttgtactctctgattatacgctctttgattatctctaggtgcagctcgcccataccagctagtacgatctgtccagactcgtcatcgttgacaaccctgaggctggggtcctctcgactcagctcggccagggctgtctccagcggggtctggaacgccacgctcgggggctcgatggtgcacaggaacacgggctccgggacgcgcgcgccaatgccgaggagtatatcagccttctcactgtcgtctggctgctcgtccaaagcgttcagtctttgtctggcactcggcaggatcagacgttccaggtcctctggtttgctcagccgggcggtgagtctggtcttagccttgttggcagcagtctgattagaagtgactaagtcccctgtcattgttaccttgagtccactaacaaccgcaatgttaccggcagtcaccttctctacaggcttatactcatcagctaaagctacgtacaatattcccgtctgttcactttgatcttgaccaaggttataaattttttgccctttgcttatttcgccactgtaaagtcttaggaacgtcaacacccctctttggtcgtcgtgttggactttgaacgctctggctgatagatctttgtcaaaacatctgtaaagctcgttacattggtctggcgaaggaaggtagtctacgacagcgtccataagagtttgtacaccaatatttttgtaagatgacccgcacacgatcgggaaacctttcatatcgatagtgcagcggcgtatagctgcagttatgtctttactttgtatattgtctaaggattcctcctgtatgatgatgtctgccagattatcgtctaaacttgaaagtgtgtccacaagatgtctgtgtccagtcatagttctttcccagacatggccatcgtccttctctgttagttttcgtcgcgtatatttttgacccctcccctgcgtccagattatttcttccaagttcaacaagtcaagtagacctattaactttccttcatgtctaacaggtgtatgtagaagcaatggtgttgcgtctagtttttcttcgatagatttgacgcaagctatttcgtctgcatcagatcggtccattttgttcagatacaatagacgaggcactctgtatccagctgcctgtcgccagactgtgagtgtttgagcttcaacaccagccgaagcatcaagcaccacgaccgcaccatctagcacggcgaggctctgctccacctccatggtgaagtcgatgtggccgggcgtgtccaccaggttgatctgactgctgccccacgggaaggacaccgccgccgaagtgatggtgatgccgcgctggcgctcctgctccatgtagtcggtgacggtgttgccgtggtgcacctcacccatggaccggatggtgcccgaatagaacaacatccgctctgtggttgttgtcttgcctgcatctat

SEQ ID NO: 1118 - DNA, 1265 bp, Plutella xylostella
cggggcggcgctccggcccggtacgcgccgccgtagcccgcgccgtaccggtattccgctgagccggggctgccggattgcgcgtagcccctgtcaccttcaggaccgtacggtccgggaggatacactggcctgttctgagggtatggcgatccgtattcatagccgtaaccgccttgctggtaaccttggctctggttgggctgcggcgggtagccctggtactgggcgctgtaaccgtccatgggcgcgcccggcgccggctgcccgccgggaaacgactctggagggttggaggtgcccgcactagtggtattattagtcttgccgcccttcttcttagtactggcttctacttgattaataatcggctgtgggtcgatgccgccgcggtcgaagtggcactcgtaggctagcaggttcttcgtgtagtgcttgcggagggtgtaagcggctgacgatgatgcgccgatgccgagcaggcccgctatgtctttccacgtcttgttctttgtcacctcgacaaatcctcctctctcgcgcaccagcagatacagtcgatacaggtctagcggctgcttggagatggtggggcaggcgccgatgggcgtccgtcgctcctccatgaaagcgaacagtcgctccagccagctgcgtcgctccggcgactcgtccatctcgaacagcttgcccaacgagtccgatttctgagcctttgatctgtaggactccggcggtatgtgactgttaaacacgggactagagggcggtcgtggccaggcgctgggcgacgcatcgtagtcgtcgtgcgagtgcgacccgccgccgggcgacggcgacggcgccgcgctgcccggaccgtagtccttgcgcgctttgggagtgccgcaggattcctcgcctgatgcagcggaagcattactgagcgtgctctgctggctgccctcatccagcggggctccatccgggccggtagtcacgagctgggtggcgggcgcggccgggccgttgtcgtgcgagtccggcccgggcgccgtgggcggcggcatgccgccgtccgacccgggcgggcccatatgccgcccgccttgctgcttattaaccggtggatagtgctgcggcggcggcggcggccggtagccggggtacgggtacgggtggtggttgcgcggcgggtacccgtacggcggctgcggcgggtagtgcggcggcttgtacccgtggtgcgggtaggcctgcgccgccagcgcgcccggcggcggcgc

SEQ ID NO: 1119 - DNA, 514 bp, Plutella xylostella
ccggctcgcagcaccccgtgctctccgctcacgtccgtcagcccgcggatcttcaacatctccgccactttcagcagcgccgtgatctgatcctgggacacattgatctctccccggtacatgaagtccaccaccgccttcaggtcgcagtacttgatgtcgcgcatgatgatgatggggtgccggcacgggttgtccatgaacagcgtctggaagtaggggctgcaggcggagagcaccaccttgtgcgccttgaggctctggccctcgcacgcgagcgtcacgtccacgaaggactcggtctgcaggagctggtcgaagcagctggccaggttgctctggtagttgttccagcgcaggcagaactgctgcggggagccgtcggcgcactcgcggccctccatcgccgcccccggttcttcctcggccggcatgtttagcgttggcgggttcgcatctgcaacgtgacgaggcgtgtgtgagagagcgactcgacacgtcctcacggtgcggc

SEQ ID NO: 1120 - DNA, 606 bp, Plutella xylostella
gccgcctccaggatctcctccatggggatgatgcgcgagttgtccccgtaggcgatgttgtcgcgcacggagcggtcgaacagcacgggctcctgctgcaccagccccagctgcttgcgcaggcgccgcaacgacagctgccgcttgatgtccttgcggtctagctccacactgccttcattcgggtcgtaggtcctcatgagcagctgcatgagcgtggacttgccgcagccgctggcgcccaccagcgccacggtgcggccggcgggcacgtgcagcgacagcccgcgcagcaccggcaccagcggccgcgtcgggtagcggaatgagactgacttgtactcgattgtgccttgcgctgaccagctgggatcatcttcaacggaatcctcagtgacgatggcgggcgtgcggttcatgatctgtataatacgggccccggagcgccgcgccgccgcgaagttaggggcgaacgagagcgcctccgccagcatccacgcgccgtagatcagcgcttcggatactagtatagcatattcatacggcatgtcttccctggcgatgagataccctccgtaggccagcgagatggcgtatccaagagtg

SEQ ID NO: 1121 - DNA, 906 bp, Plutella xylostella
gttaaagaataaatcaataaatgatttcaagatatacacaactataaaaacatttaagataatacttaatcataatataataattatatatagcgaaatatattatgtgcacaaataaaattctaggtgacttaaaatttgtcttagtcgttacttgctaatgaatttcctagtagagcgcagagtcgggactctctcgaacgtttaccgttttacttttaataatttatttaattttacataaattttgaatctgaaggcctaaatgcgagtgtcgtgttttattttatttttgtgtgttcccgttactccagctgctccaggaagttgggtgtcttgaagtactcgggcacggggtcgtcgaggcgcgagatcaccttgtagatgctcttcttccagctctgctccgtgtccttgccgccctggatggcgcggaagaactcgcgcagggtctgctccaccacgtaccggaagttctgcgggacctcaatgtggttattgcggttgtagtgcaggttgagcacgcggtacagctcggagtccccggctacatggagctcctcggccgccttcagcccctcgctgatggcctgccgcgcgtacttctccatctggatgtagtagaactctctgaagtttgagaaccacttgacgagttgcgcagtattgttcttgttgaacttgatgtcggggaagtacatcttgagcacggcggagctggggtagcgcacccagaagaacatgagcttggccttccggaggtgcatgggcgtcagcgtggaactagtaggctgcacgccgtcgtagggcaggtcggtggagttgcagtcggagtggtcctggtccaggtggtggtggtgcatgtgctggtggcgcaggtagtcgggggccgcggccagcagcgcg

SEQ ID NO: 1122 - DNA, 2474 bp, Plutella xylostella
ttcttactaactaaaaacaaaatacctcttcaacaaaaccaaaattgtcctcatcataattctattcataatcctcatcattgctgtcatcaggctccgaataatcttcatctacttccaccttccttctctttacaacctgtacattctctttttcttcctctttatcagtttccttggcttcgaccttggctgatctgtggtggaacacaaacgagatggtcttagctagatcccagcattgcttcaacaccatgtcagctagagtcttcttgtctgcacagtgataccagttggataagtccgatgtgcagtcagaattctccggcggaatcgtcacttgtatgttgttcacgcatcttttacacttgaacttgctgtgagtgtctgatagtgtgttctcttcaagcctaaacaagtccttcaggtcgtctgatgtgaaatgcctcaaagattcttcattttggtctacaacagtgtcgctaagagctttcttgtgagcttggcgttggaatattttctcctcaatggttcctgttgctaggagcctgtagatgtagcagggtttcttctggccgtcacgccagactcgcgccatggcctggtcgtcattagccgggttccagtccgggtcgaacatgatgaggcggttggctccaataaggttcagtccgcagccacctgcctttgagctgagcatgaagatccactccttagagtctttatcattgaagctctcaacaaccttagctcgtttcttgatggtcatggacccatccagcctcacgtactggtagcatcgcttcctgcacagcttctcaaataagtccagtgtttgtgtgtagttagatactaagactattttgtcatcagtgttggtcttcaagttggccaagatgcagtccaggatcatcagttttcctgaaaactctggcttcacatccttgatgtcatagtgactgggcagcagatccaatgccttctcaaagccctcagacctctccacaattttgtcatagacaaggtctgggtggttgcagagtttcttcagtgtggtgatactggaaagggcactcagtgtgttgccagatttctctgcattgcctgagaatttatttctgattgaatcagagtttatgaaattcttgtagagctgtgtctgaaggggggtcattttgacgcaaatgacttgctcaaacttgactggcaggtacttggtgagtaaaccactggtcctcctgatcatgcacttgttcactattgatgtgagggtctggagacactcctgggctttctccctctctgagtcactggcgagggcatcctgtcccttcagtatgggattctcatactttctcttaaactcatgtgcagtccccagtatgccttcattgacaaaggagaccaagctgaagtattcagtcagatcattctgtatgggtgtgccagagatgagtatcctcctcttggccttcaaccccatcagtgcttgataagtttggttctcgctgttcttgagtctgtgtccttcatcacagagcaccaggcccacttctgatgagtgcaggatgttggagtatatcctgaacgtttcatacgagatgatgagaaccggagtggccactcttgtagcagagtatgtgttcatgaactgctgcagtttcagagtgatctctgctttggatcctccatccattggcagagcattgatcctggagcccagccacttgcctatctcattgtaccagttcttgactaaactgcttgggcacactatgatagctttgcaaatggtgggtttgcactgtggtccttgacgcaacaatgtccacagtagtgtaatacattgtagggtctttccaagacccatttcatcagccataatgcatccgaatgcgttttcgatctgtttccccgtgacgcagtcgtacatgaacttgacgccctctctctgatggggccgcagtatgttgcccagcacggggtccacgacgacggctacattgatgtcattggggttcatcttcatcctctcgtgctcggggaggtgcggggggcggtacagcacgagggcattgggctcgtcagggtcgtgaagcgcgcgccgcacctgtgttcgcttcagacctaagctcttaccgcaataagacgacacatagttcggaatcggcaccttgaatggtttgttcagtatctgccggatcagagcctcgtgctcggacgtagacattgattgcgaaggggtaatcttttgagatagttgtatttttgtgcattcccgcttctttcgttgcgacttctggagcagcggactcttgaatacattgtcgctagagccgacctggctaggagctaggcttcgtctcatggttaattcaatattaaaacatttcacttgattagaatgatttgataaacattgaaaaacaaaaaataaatgttcaaatgagttccatgaagaaaaacctcagaca

SEQ ID NO: 1123 - DNA, 1261 bp, Plutella xylostella
ctattagcggcctgcaggttcatctggcgctgcatctgctcgagcatctcctgcatgcggcgcagctccgcctccttctcccggagagccttctcgcgctccgtcgggtcctcgctagagccgttggagagcccgttggagtccgcctcgcttatgccgctttctgttgacatgtgtctcttgggcacctgcccgttgcgcgcgagccgctcggagcggtagttctcgtagtgcacctcctgagtcacttcctgcaggtcttgcatgtgcgtgatgagcatagtcctgagcttgatgaagtcgcagtggtcggggttctcggcctccaccacgccccacgggtacaggcggccgcgcaccttgcgcccgcgcacctccagttgctgtcccgcgccgcacaccgcgaacgggacggcggctttgagttggcggacctgttccttgtagtcctcgtcctcgtcgctgtcgcagtccggcagcgggtagatcttgatgccctcgcgcccgatctcctccatcaccctagacttgagccgctgcacctccttcttggtgaggcagtcggccttggcgatgacgggcacgatgttcaccttgttgtgcagctgcttcatgaactctatgtccaggggcttgaggccatgtccaaaaggcgatatgaagtagaagcagcagtggatgcggttgtcgacgatgttgcgccggttgagcccgctctcgtcgcgcaggaaccgctcgaactgctcgtcgatgtactggattatagacttaaagcagtcagtgttgtcgatggcgtccccgtagccgggcgtgtccaccacggtgagccgcagcttcacgccccgctcctcgatctccaccgtggacgcgtccagcttcaccgtctggttcgtcttctcaatggcatcagggataaccctctccgggtacaagtcagtgaggaacagagagttaacaagcgtggacttgccgagcccgctctccccaaccaccatcagggtgaactcgaagcccttcttcaccgacttgcggtgcacctggtttggcaagttggcgaagccgacatagcctggagtctccaggtttgagaaatttttattattagccgtgtcgctagacattttgaattatttgttgggactcccgtggaattaaatctgaatgtcgatcaggacagaataacacaggaacaattattgaaacgagtagtacacaatagatgcagatgtggtaatttttaagtacttttcgtagtacaaag

SEQ ID NO: 1124 - DNA, 2648 bp, Plutella xylostella
tcagccatataaaatatcgtttgaaaagcaagctgaatcccattgaggataaaacataaaaagctatacgacctgaattcaatttcagaatagtaaccagcattatctgcagtcataatattgcaactgaatatccctaataacatttcaccagtcttaaaacttagcccataaagtctcaaagacaatttaaattaaataaataaaatataaaataaataacaacacacgttatgaacgcgattcatacattaaaacatgctgtgcaagctatatctaataaataacattgtaatatatgtttgttcttagctaatacaataactaacatacaccgacaccatagctgcctagacgctttcgtcatattcctaattcgacgaagggtttcaagatggcgacattatatggaagcagtaagctaatagaatagctcaggtgagtattgcatctatttgtgccattctgtcgatgctatcattcacacaagcgccaaaacaccgcaccacctaaatacgcctactttgcttttaaaaggtaactaaaaatgactatacataacctttgcttacgcatacgttattacgtgctctgttgctattggacgtgtattacacttaggggcggttcttgaacagctgttcgacgacggcggggtcagccagggtggaggtgtctccgatgtcggtgtcgttgagtgcgatcttcctgagtatccggcgcatgatcttgcccgacctggtcttaggcagacctggagcgtactgtatagtgtcggggacggcgaaggctcctatacgggcgcggactagcttcttcaaggcgtcgacgagtgattggtcgaagtgtgcgccgtcagtggtggttataaagcagtagagggcttcgcccttaatggggtgggggcgggagacgacggctgcctcggcaacgcgaggttcctcggtcagcacgccctccacctcggccgtggacatgaggtggccggacacgttcagcatgtcgtccacgcgccccgtcacccacaggaagccgtcctcgtcgcgacgggcgccgtcgcccgtacaatagtagcccgggaacttggagaagtagacctgctcgtagcgctggtggtcgccgtacagcgtgcgcatgaggccgggccagggccgcgcgaacaccaggtagccctcgccttcgcccgagatgagttgcccgccctcgtctagtaaagcgggttctacgccgaagaaggggaagcccgcagcgccgggcttcatgggcgtggcgccgggcagcgacgtgagcacgtggccgccggtctccgtctgccagaacgtgtcggccacggagcagcgcccgccgcccaccagctggcggtaccagagccacgcctccgggtttatgggttcgccgacgctgccgagcacgcgcagggattgcaggctgtgtcttttaacatattcgtctccgaacttcatgagtgaccggagggcggtgggcgccgtgtagaactgcgacaccttgtacttgtctatgagggaccagtaccggtcattctcggggtagaacggagtgccttcgaacaagacagaagtggcagcgttagccagcggcgcgtacacaacgtacgtgtggccggtgatccagcccacgtcggcggtgcaccagtacacgtccttgtcttggtagtcgaacacgtagcggaacgtcgtcgtcgcgtagagaaggtagccggctgtagtgtgtagcacgcctttaggtttgccggtggaaccgctggtgtaaagcatgaagagcgggtcctcggccgccatccactccggcgagcagatcgtggactgctcgtcgatcagctcctgccaccacacgtcacgctcgtcgtcccacgtcgtatattcctgtagctgtccgcacggcgtgactcggtctacgtgtttgacgacgaggcacgtctccaccttgtggccgtgtttcttctccgccttgtctatggcctcgtcgcagatcttcttcagcatgagcagcttctccccgcgccaggcgccgtcggcggtgaccagcatcttggccttgcagtcagacatgcgctcggcgagcgagtcggaggagaagcctgcgaacacgacggagtgcacggccccgatcctggagcaggccagcatgacgaccactgtctccaggatcatgggcatgtagatggagacgcggtcgcccttggtgaccccgcgctcgcgcagcccgttggcgcactggcagacgaggtccttgagcttgcggtacgtgatgcggctgtagtcatccgggtggttgccttcccagtaataggcgatcttatccccgtggccattcctcacgttccggtccagcaaattaaagcagacgttggtcacggcaccgtccaaccatttagtaaacactttacccttatttatatcaaagttgtatgacacaaagttcccgggctctgctggagtctgccagtagaattctttggctatttcagaccagaatgcctcggggtcttccaaggatcgtttgtgcatctccttgtattgctcgaaagacggcaagcgggatttagacacgacataatcggaaggttggtaaagacgcgacatcgtaatttagtggcgcgcagaaacgtgcacccccgccaaaacaca

SEQ ID NO: 1125 - DNA, 1340 bp, Plutella xylostella
caaaatacctcttcaacaaaacctaaatggtcctcatcataattctattcataatcctcatcattgctgtcatcaggctccgaataatcttcatctacttccaccttccttctctttacaacctgtacattctctttttcttcctctttatcagtttccttggcttcgaccttggctgatctgtggtggaacacaaacgagatggtcttagctagatcccagcattgcttcaacaccatgtcagctagagtcttcttgtctgcacagtgataccagttggataagtccgatgtgcagtcagaattctccggcggaatcgtcacttgtatgttgttcacgcatcttttacacttgaacttgctgtgagtgtctgatagtgtgttctcttcaagcctaaacaagtccttcaggtcgtctgaagtgaaatgccttaaggattcttcattttggtctacaacagtgtcgctaagagctttcttgtgagcttggcgttggaatattttctcctcaatggttcctgttgctaggagcctgtagatgtagcagggtttcttctggccgtcacgccagactcgcgccatggcctggtcgtcattagccgggttccagtccgggtcgaacatgatgaggcggttggctccaataaggttcagtccgcagccacctgcctttgagctgagcatgaagatccactccttagagtctttatcattgaagctctcaacaaccttagctcgtttcttgatggtcatggacccatccagcctcacatactggtagcaccgcttcctgcacagcttctcaaataagtccagtgtttgtgtgtagttagatactaacactattttgtcatcagtgttggttttcaagttagccaagatgcagtctaagatcatcagttttcctgaaaactctggcttcacatccttgatgtcatagtgactgggcaacagatccagtgccttttcaaagccctctgacctctccacaattttgtcatagacaaggtctgggtggttgcagagtttcttcagtgttgtgatactggacagggcactcagggtgttaccagatttctctgcatttccagagaatttattcctgattgaatcagagtttatgaaattcttgtagagctgtgtctgaaggggagtcattttgacacaaatgacttgctcaaacttgactggcaggtacttggtgagtaaaccactggttctcctgatcatgcacttgttcacaattgatgtgagggtctggagacactcctgggctttctccctctctgagtcactggcgagggcatcctgtcccttcagtatgggattctcatactttct

SEQ ID NO: 1126 - DNA, 2393 bp, Plutella xylostella
gcttacattacaaaagtcattattaggcagataacatagagataacttacaaataacttattgatttaattcaggcacactggtattcttactaggcatacaacatccaacttagaaagactaacctacgcgatacatttcacatgaatgtaattttcgtcctcacttggttgacttgccagacgttcaggttttcgtactcctcgatacaagcatcaacctggtcaggcttgaagcccttgtcgacgcagcgctcgatgacgtcggccaccttcacggtcttgctgctgccggccaggtcacgcaccaccgcgaagatgcggtccgtcgcgctgatgcctctctgcacgttggtgtcgtcgacgtgcgtgagcgactgcttggacatgtccaccagccggatcgcctcggagacatcctccttctccaccacgtccgacaatctgagtcgagcgagcgcggtggacaggcgcaggatggcgagcaggttccgggccgaggtgaaggtgacgtcgcgcgcgttgcgagcctcgcgacgcagctccacgtaggatgacacgatgtagtcggcgagcgcgcgcggcacggccggctgcttgcgcttggtgagcgcgatgtagcggcgcacgaggcgcatgggcagcgccgccaccgccgtcggcggctgcgacgagtgctggtgcacgtacgctatgtgcttggctagctccaggtctttctcgcggttaggcttgtcctgtatgagccacagcaggtcgaaccgactcagcagggcagcaggcagctgtatgttctgctcgatggtccgcttggggttgtagcggccgtacgcggggttggccgccgccaggatcgacacgcgcgcgttcaggcacgtcattatacccgccttagcaatactgatggtctgctgctccatgacctcgtgtatggcggtgcggtcggcctccgccatcttgtcgaactcgtcgatgcagcacacgccctggtccgccagcaccagcgcgccgccctccagcatcatctcgccagtgaacgggtccttcataacagcagccgtgagtccaaccccggaagacccgcggccggtggtgtactgcgagcgcggcgccaggcggtcgatgtagcccagcagctgcgacttggccacccccgggtcgcccatcaggcagatgttgatgttgccgcggatcttcatgccgttcggtcgtttgtcaacgcccccaaccagcagcagcagcagagccttcttgacgtcctcgtgtccgtagatctcgggcgcgaggctgcgagccatgcgcgagtagaggtcttcgtctgctagctctgacagctcttcttctgtgagggcctcggctaactcgccctcttccgattggttgatgcagtgcacgctatgagcctccaaatacgtgtccgacagtaagcctgccatcatctgcttgaacccggcgctgagtagtggcaggaagatcccgctgacggccacgtggtcgccgggctgcgcgcgccgcgtgatctctccgcgacagtacacggagagttggcgcgggatgtgccccacggggacttggtctgaatgctcctgaatcttaagctcctggaacttctggaaccgtgaccccctggtctgcagatgcagctgcccggacgccttgttgaggcggcagtcgtcggccgtgcagaccgccgggggggtgaactgcaggccgcgcaccggctggtaggtctccgcgccgcaagcgctgcatgagtaggtggccaccaccatgaggggcttgacgtctgtgcagcgggttactatgcctctcactgtgaccagcttgccaatgtgttcagccttcacctctctgatgggcactgactttgatgaggacaggtctttgaagtacacttcaaatctcctgataagttctggtgggtatctgttgcgggggtccctcatctcgccggggatgcggtggttccgcgcctccagcatgatgcggtgctcaatgtacacatccagggaatctttggcaacaacctctcggtgcttgtactcaggcagcatatcatagacgacgtcagagaccatgttggtgtagcggcgcgtgttgcgcagcaccgcctccgccagctcctcgttcgcctcgtgcaggtcgtccagctccaccaggaatgccgtctgttcccggtgagccacgcgggtgagctggtcggcatacttgaacaccttgtgtccctcatcatcagtctgacagaaatccacgaagaagttcttcaaagcttctttatccgcggcataatcacgcatcgccattttcacagtatttatgtgctaaaattagtaaatatcaacaaaattattaaaatcaaaatgccgtgaacagcggctggctttgtttgtttga

SEQ ID NO: 1127 - DNA, 867 bp, Plutella xylostella
gtctccgggcacggcctcctgcagcgcctcgtggtgcatctccacggacttcacctccgtggtgatggccgccggggcaaaaaccaccaccatgcctggcttcagtatgccggtctcgacgcggccgacgggcacggtgccgatgccgccaatcttgtacacgtcctgcagcggcagccgcagcggcttctccgtgggacgggacggcggctggatcgcgtccagagcctcaatgaggcacttcccctcgaccttgccctccttgcgctcgatggtccaccccttgaaccacggcatcttgtcggacggctccagcatgttgtccccgtgccagcccgagatcggcacgaacgccaccgacgccgggttgtacccaatcttcttgatgtacgacgacacctccttcttgatctcctcgtagcgcgcctcgtggtagggcggctcggtggagtccatcttgttgacgcccacgatcagctgcttgacgcccagcgtgaaggcgagcagggcgtgctcgcgcgtctgcccgttcttgctgatgcccgcctcgaactcgcccgtgcccgccgccacgatcagcaccgcgcagtccgcctgagaggttccggtgatcatgttcttgatgaagtccctgtgcccgggggcgtcaatgatggtcacatagtatttggcagtttcgaacttccacagagctatgtcaatggtgataccgcgctcacgctccgctttcaacttgtccaacacccaggcatacttgaaggaccccttgcccatttcctgagcctccttctcgaacttctcgatggtacgtttgtcgatgccgccgcatttgtagatgaggtgtccggtggtggtggacttgccgga

SEQ ID NO: 1128 - DNA, 1517 bp, Plutella xylostella
cctccctctcatagctttgtgccatcttaccgcggttcctggccctcagcagcgccagtatcgctgccaccacggccgcggctactagggcgccgcccgcgccgcccgccgcgccgcgccataagccccaggacgcgggggtgagggagctgctctccactgtggccgtcggcttgacgggcacgacctcatcacttttctctaccacctctttgctcagactctcgttgcggagcgcttcttctgagaaccggtacactttgtacgggttgatttctgcgacgtagacgtcagcgccatctggcgagacggcgacgtcgtgcgggttgtggaagtctccttgtggggcgaaggtctgtatgaggcggccggtcttgaagtctatgatgtacccgcgaacggggactgtggctccggggccgttcaccacgtataagcggcctccatgcaccggcgagtaggccacactgaacactcttggcccgatcagccagttcttgtagctcgccacataagtgccattatcagttcggaagcaggccacgcgtccattctcgcggtccgccacgcacacctgccccttgtcctcggccaaagtgagagcgtggggcaggttaaacgagtaaggggagtcgctgctgtctcgcccccactgcagtatccgctgcccctcggcgttaaacttgatgaccctggtgttgcagtagccgtctgacacgaagaagtcaccattgcccagcaccgccacgccgctcggcttgcagaagtgagtctcgtctgcaccgggcacgaacttctctccaagtacaagttgtggtttggtccggtccccagcggtgaacttgaacacttggtgcatggccacatccgtcacccagtagttgccctgcgtgtctatggtcagaccgtgcggcatgtagaacaagttctgaccccatttatcaacaatggatcctgtatcattgaaaactagcagagtgggttctggaataggtttagtagttatgcccttatacacattgtccatgtaaaatgtggtggcatcccacacattggcagcccggtggaagatcaccagtctccccgagttgtccagagccactgccgacacctgcccgaggttcactgagcgatccggccactcggggacccattctggagcatggtctagcttttccaaagccgtttgtatcttagcatagtgattttcttggcctctgttatagtagccagggtaatacccaggttccacataacttcgacagttaatagatgttactgacgaaagcagcacaattaaaacttttatttcagtaggaataaaatcaatcgaccgaaattgcattttaaaactgtatcaacactaacgactgagcccggctgagtggctggagattaggaaaatcgattgatatctatcaacagcaggcacttaaacataacaaatgaaataaaccagccctattggcattatcaacatttttccgatttcgattttgatagattttgatacacgg

SEQ ID NO: 1129 - DNA, 1342 bp, Plutella xylostella
cgcggtccggggtcgtgctggtcgtaccgcccgctgacaagcagtacttgagcgcatcgagcatgatgtcatgcagcatgtccatgcgctgcatgtcggtgagcccgacgcgggaggggctcagcagcagcgcgccgcagagcagaccgacctcgtcctccgtgagctgcaggttgttcactgtacgcatgtacgcgatctgcgctgctgccagaccggcatcaccataagcagtctccagctggtactggtagaacacggagccgtcgtcgaagaccagctggttggccgaggcgaagcgcgcggcgcgggtcacccacacctcgaagaaacccagcttaatgagaatgagctggtcatcctggggcagcagatagaagccgggcagcttcttggcgaactccactacctgctggatggcaggcgtcatgcgcaccgccatggccgcccacagcagagacttcgtcttgggcgcgtccgtgctggaactcgccgcctcctcgccttcattggcgcggtcgacgtcgccctcgggctggacgaccacgtcgtggcgcgccagggtacacttcagctcatcggtgtacgagttgtgggcgcgatgggcggccaccacgtccacggcgatctcccgcgccacgccctcacggacggcctcgggctgcgcttccatgccactgctcatgctgcttgcgctgctcacgctgctaagactcgtgctgctcgccggcgccgctactgcttcctcacggggttctcgaacgcgtttggggactcttccgtaccgcacggaatctctgctcatgccaactgccaggcactttttaaaccggcagtattggcaccggttgcgattcagtcggatcacgagacacttgccgtctcgcaagcagcggtactcaatctgcttctgaatactacgcctgaagaatcccttacacccctcacaggaggtgactccgtagtgatacccggaggccttgtcgccgcacacgcggcacggcgacgccgccttgcccgccgccccgctggcgctatccgccgcctggtagctctgctccggggaaccaccagacgacggtgaacacggctcttccttgaatgtatagaagtcttcttcctcatctaggccggacgaactcgtcgcttccacaagaacagtgccgctcatcactatttactataaaaatctaagaattaacactgataaaagctacttgataaccatttttgagtttttaaaatatttgtataggttagagatgacagtgtttcataataagccgtacggattcataggttttccgtgaagagccgcggtcgggaactactagaaatgttg

SEQ ID NO: 1130 - DNA, 1389 bp, Plutella xylostella
attctgttatcacttttgaaatattgtgaccattgttaacagtaggttgaaagtaataatttaacatagttcttcagttccagattgcatggtacaatgtatatcccaactttattttaaataattatgtcacagtatacggattaggtttattatacctgtgtcacataggaatagaccataagtatagaactctctttgccaaagactcaacataaaattctttaatccaagtaataaattaatttacattcacatacatctgataaagatgatacaaataaaatatttatgtacataaaatagatctcttcatatcactgtcacgaaagaatctcacaacaacctgttaattaagtaataaataatggaactaaaaagacccttcatactatgagtcatcaaatgtcattctccctgtaccatgctgcttcatgtacctccggtactgtttgtatttattgttttcggcaagtgcctttttagcctcttcatcctttatctctttccacactttaaagttctccttaatccataattcttcatctaagtactcttgcttctcttcatcttctacagcgttaaactgatgttcacctaagttgaggttctttctaattaaataaaacttttcctcttcaccgtagggctgcttcatgagagtgaacttccagaaccaccgcaagtaccagtagacgtagtacgagatggtgtagggcaggatgatgagctgcacccataggatgtcggtgacctccggccgcgcatatgcccccttgatgtccatcttctcctcaatcactcgccggattatccggtccatctcctccttctgttccgctttactcttcttggttttcttgctactaacttcttttgtttcagctttggctatttctaatgctttatttctatactttggcaccgtcatgaagtacttgatagcggtgtcatactttgaccatccactaaagtactgaatcagggatattattgttatcgttacagctataacaattctcacatccactttgggggccattcgcctcctgtaatatctgtagtagtgagcatagtattcctgtgggttgtccaacatgtagtcatagtcggacctttcttcttcatctcggagtatttcgtaggcagtcgctatttccttgaacttctctcccgcctccagcttggcatcaggatcgcggtgtagatcgggatggtatttcttggctagtgaccggtaggctttgccgatctcagacttggtggcctcgcgggtgagccccagcacgtcgtagcagttttccttaccacagtagatgccctcgaggagatggtcggctgaagacacctccgccactttccacgtgagcgtgagaagcaacagacatt

SEQ ID NO: 1131 - DNA, 3689 bp, Plutella xylostella
ggcttcttgtatcctaacattcaacaacatattaattttctatcgcttttaaacagctgaaccacgctgagcttacatttatagcgcaccatccacgtcccacttctttacaaacataggattccttttacgaactgcacatttctttccaaccacaggattccttttacaaactacctccaaaaagcggcgcatactcaagcagtaatagcggcctgtccctcgcagtgtatccgcacattgatgttcacggcggccagttgcgtgacgaagaacttgaatatgtaggggatggcgagctgccgcgccgccgccgcgccgcacaggcgacacgcgcccgcagcgcacgagatcagaggcccgaggagcgagccacaggacgtgcagattgtcgcctcggtcttgtcggagcagtgcagcaggcggtcctggagtacaaacgacgcgccgtgtgagatgagcgcgtcccgctccatctctccgaggcgcacgccgccgccgcgacgacgacctttaacaggctgcctcgtcaacgcatcaacagcccccgtggtccgcacctgccacttgtcggacaccatgtgtcgcagtcgctggtagtggatcacgccgaagaatatatctgctaccatctcacgcccgtccgctccactgtacatgcgctcggtgccgtagtagttgtacccgccggcctctaacaagcggccgaagtggtccacggctgtgtcctgctcgttgaagcggaacggcgttgcgtcgtgcacctgtccgtgcagcggcgcgctcttgccggccatgcactcgagcatcatggcgatggtcatgcgcgacgggaagccgtgcgggttgaacagcacgtcgggcaccagccccgcctccgtgaagggaaggtcttcagcgggccacagttgggagcatatgcctttttggccggctcgggaggcgaacttgtcgcctactgatgggttgcgctgtatcctcatcatgatgatggccttcttcccggctctgacgctgaagtcgccgcactgccgcaccgagtccaccgccgccgcctccttgtacttgaacttgtgtagcacgaaggagctcttgtctgcgtcgtagtaactgtagaaggggtcatcaaactttagtacagctccaactggcggcaaaccatcttcatccaggaactgatgcaagtccgtggccgcgggatccctacagaagtatgaagatgggttctccaaatccaccacttcagacttgtagatggagccggccgcaaaccctcgctgatgcgccgccttgttgattatcatcgcgtcttccatgtcgtagcccgtgtaagaaataaccgccaccacggcattagttcccatggggtagtcatccagagccactctatcataatgggcaggtcggaacaagggcgtggccggcgtgtgcagacggtacagcttggtctccgcgttcgtggcccacgtgtggatgggcgtgcccatcgtttgcttgcccatctggcattggtacatgttacgcggcgactggttgcagtccggcatgggcaccagctgcgccaagttgctcatgaaggctgacttcgacagctccacgtgggtagttgtttctgtggcctcctccgcggtgatggccacgagcaggtgcagctgctccatgccgcccaccagctccacgtcttggtgagccaggttgatgaccggacggaccatccggccctcggtggtgaagaggaagatgccggggaattgtgagcagatctccttcttcggcacaaacacgatctcggtgctattgggcaacttctccccctttatcttcagtgtcctcatgtggctgacggcgcgggcagccgacgcctctgggaggcgtcccacgagacgcccgtccaagaagactgagtaggagtagcccgggatggactgtcggatggagaccatgcccgcatattcctgtagcacctcgggtattttagccacaatattcgggtctgcatgttgtgtgacctgcgcggtgtgagtgagatggttgagcaggccgcagggcgcgccgtcgggcgtgtgaacgggacagacgaagccccacgcgtctggcagcaactgacgcgcttctgttgtccgcatttccatgaagaatgctcctcggtggatcgccttgaagtggctcatgtagcgcatcctattgatgttctcgggcacgatggtgagtcccttgtactgcggcaacgtgaggttgttggagggcgcggtgccggtggacaggaacgactccatgcgcgcctccagagtgccgcacttgcgcaagagttgttggaattctttcatattaaacacgaacttcttagtcccagcaacggacctctgcacgttaatacgcaggttattcagaaagtcctgaagtctttctttcagcacttgtaaataaagatggccgccgaccaggatctcttgcaccattaccgcatcagctccttccaccttacacttatccgtagccaacgcatacagcttctgcgccatgaaaaccagcgcgttaaacttatccgtatagtccggtatgtgtataagcagacagcgcttcagcagccaatcagcggcctccacgtcactggtccagggcggcaactcgtatagtttgtgtcggaacatacggccgaggtataggaggcagtcttctgacgtgtgcaggttttcttcgtgtaattcgcgtagcatgttttgaacgcagttagtataatacaagtcatcagtatgcccctgcagcagtatattataaatctcgtggtcagggtagtcgaccagacacttcatgatgagcagtagaggcgcgtagtacatgatcttgcgatgagagaacatgatcttgcagccgccattttgtaggaagtggagcacgttattagtgctagtctgatcatccttcacgcagcgcatcagcaccccgcagtcggtgaacaggttcccgcgggtcttccagccggagcgccggatcgccaccgggtagttcctcctggtgactaggagcatgcgggcgagacgctcgtggccctttataataaagtatccaccccactcatctccatgttcattcacttgtatgagctcctccggtgacatgtctgccaagtgacacatttttgaccttatcatgataggcaggttacccaaagacttgtcagtagtgatggacttgccatcaacagtcattgtgattctaatcttgaattctcccttgtatgtagccccccgctgccggcattctgtcggtagcactcgctggttcttcacccccaccacgtcggtgggaacactgggcttgcagaacccagcttcgtcaatggtagcctttactcgctctccgcttggtaactcaaattcaacaggatataagtctgcaaccgctttttctaagccttcttccaacatgtagttgaaggagtctacatgaggcgctcccaggcattgtagataagggttagaaattttcgagggcttccggtagtcaggattgctagtgtatgacagggaaggtccctgaaatactttctttttacagtccacttcagatttcgtcattatgattgaatttacattgatttattcacacaaatagttgcttgaaatagcaaatcaaaataaaaacacgtgcgcgccgctcaatttgtcaatatgacactgacacttgcg

SEQ ID NO: 1132 - DNA, 683 bp, Plutella xylostella
gtgcgcaggcgccgcagcgcgcgcgggctctgccgcaggtccttcttgtacttgcgcttgaactcgtcggcgaggtggttgacgaggcggttgtcgaagtcctcgccgccgaggtgcgtgtcgccggccgtggagcgcacctcgaacagcgcgccctcgtcgatggtcagcaccgacacgtcgaacgtgccgccgccgaggtcgaagatcagcacgttgcgctcgcccttcaggttcttgtccagcccgtaggccaaggctgcagccgtgggctcgttgatgatcctcagcacattcagaccggcgatggctccagcgtctttagtagcctggcgttgggagtcgttgaagtacgccggcacggtgatgacggcgtctttaaccgacgtaccgaggtacgcctcagcagtttcccgcatcttcgtcagcaccatgctactgacctcttcgggcgcgaacttcttcacctcccctttgaactccacctgtatcttcggcttgccgccgtcgctgatcaccttaaaaggccagtgcttcatgtctgcttgtatcttggggtcatcgaacttgcgtccgatgagtcgcttggcgtcgaacacggtgttgctggggttcagcgccacctggttcttggccgcgtctccgatgagccgctccgagtccgtgaaggccacataggatgg

SEQ ID NO: 1133 - DNA, 1343 bp, Plutella xylostella
cattaattcaggtaaacttaagaaagaaggaatgtacaggaccttaaaatactgtatggcagagtatttttaaacgaaataattatattcaactaactaacgctaatggaacaagaagacacatggcgaaattgactcacggttgtaggttaactattactaagattactatctcatccagtcaaaggaagttgttcagttcttttcgggaccaaagaaaggtccagagggttcttcaaaatatctttgccttcatcattcaagtcgatgctgagttctggctccgagtcactcggctcattcttagggcttctaaagagtacagcagtagatttgaaagaaagatcaataggctggtcctgctctatggccacaccacccgccgcaggagagtgcaggatagaatcgccaccgttgcggttttgccacgtggacgttataccaggtggtaccggccgaatgttcaaggccggaataaacgtaccgcttctcggcgagaaactaggagtggacgatccgcttctaaacggagaagtcggtaagttaatagacacggccgaagactttctttttctcgtgtcctttgaggaggaattcctaatggcatgtaaccgcacgtccttttcactgcacggtgaagacgctgatcggaatatgctgaggccactggtacttcgggagctgttgtcgtcctcagggtcagctgatgatgctccagagtcggacggagacacgctttgcctcgtaacgtcttcagtgaatgggtttttttcgttgtgcttgtagtattccgccagggctgccgctgggagcagatttgtcggtatgaacgaaggattcatggcggggttgaatgcaggcggtgacttactcgtctggatgtgctgcatgtggtgttgttgctgctcctgcagtaagcagtggatcttgaaccagttggatctcctcccgtatctcgagccagacttggacataccgaccagcagacatttacgtagccgacacgccttgcaagcggttctattcttcttattaatgacgcattcaccgttgttcttgcattctgatatcgacgacaggttgttgtaagtgcgcccgaagaacgatttgcatccctcgcaggtgaaggctccgaagtggaacccggcggccggctccccgcacaccttgcactgctggttcatcttaaaagctttttcagttaccagcagccgccaacgtttcttgaaattttcctaattatgtacaaaatagtttataatgtttatcacaaaactgccttctgttcttcttcaaacatcacttcaactggaacacaaacggaagcactatcacaagagaag

SEQ ID NO: 1134 - DNA, 1916 bp, Plutella xylostella
cccgtcagagtatatagcttcgcggagctaggcttagcgtgtttagtgtaagcgatcagagatacttgaccgcggcgtttgctcgactgttagagggtgtaggtttgtataccacggtaagggatatcggataaatcgtcttgcttcagcgatcaggacagtagtttaaaagccatggactttaaaagcagaccattctataagtaagctttgttgtcgacggtttacttcgctgtagcaggacgattggcattgacagtgtggggttgagggtcgagcaagcgccggtcgtgtgcgtcggcggtacttacgtccagtgagagggtgcatcaatgcggggtgtgcggctggcgcggccgtggcaactgccggcttgggcttgctgaccttcgtgttgcttttagcgaactccagccgaatcgtttgcggcatgtcggggtcgaaccggacaccctgctgaaggtcctgcttggcggcctccgcgccggcgcgagtgtggaacgtcacgaaccccaccggcgatgctgttttgccattcttgctggtcactttcagtagtgatccctcgtagccctcatatgctcggaacaacaggtatagttctcgaggcttggcgtccatgggcaggccgctcacaaaaagagtccgcacctcttcctccgtggtggcggtgttgacggagtccatgctctggcagagcgcgagctccatggtcttgtggtgcggcgaggagggcgtgggggacggctgcggcggcaccaccgcggcctgcgacgacggcggagcgcccgcgcccggcagcccgcccgcctgcaggctctgctgctgcaggtgggccaggttcagctggtgctgctgcacgatgctctgctgcactatactctgctgcaccttgatgtgctggtgcacggcgagctggtggatggggtgcagcggggcgggcgcggggtacgggggcgagagccgctgccgcttcacctgtgcactctgcagcgcttcgtgcaaccgcttgacggggagcgggctctggccgaggttatccacggctgtggcgggggggccggccgagtccgagactccggcgagcaccgacaggggcgaggggcgcggggcgcggggcgcggctcactcacacacacacaccggggtctgtggcgccgacgcggggggacagtcagtacagctactcctgagggccgcccggcacatttacttcctcatacggattcgtgggtattcaggatatgaacgacatcagagtcaggagttgctttgaatccttatgttcagtcttctctttacaggtgataacacggtaaaagttaattgtccttatacaatgaattttagctgtaaattcaacatgaatatcataaaatatgctacgtaaaatatcgcgttaacgttgaatatttatattaagtcttactgaatttaattgatatatttttaaacctacaggcacaatactgatatgtatttgattttgataagattactttatgtctaagtcataattttaacgatttttcttgggttcatttattattcggctctcagcaagatggtgttacggtgacctttcacattctcgtcatttccgtattttccgaccaccactttactgtcactttgtccggcagagctttcacgatgacacataatgcgttaacactcaaaattagttcattttcacttaatttcccggttatttagggcttttatggcggatgtccttcctcgtccaaccacttcgggaaacgttatcgaatcgctcagtttttacgtcacattgcacaaacatagacttatactgaaacacgaaagaaggtgggtcggttaatgtaattagagtgaatatttgatgttttatttattgcttatctttggttttggcgtgccttggagccgtggtg

SEQ ID NO: 1135 - DNA, 2874 bp, Plutella xylostella
agaatagaatataatattctattctctgcaggggtgttagtagctgcaggtgctctctagaatggaacctttgtgcttattgccacaagatctcataaccaacttcctaagcagttcgcaccacgctggaccactttgacgtagtaaatcattccttgttgtgctcttgtgctctacattacacattagtatattattcttatgcatctaaaattcaaaacatcccgccctgtctattactgcaccgttactactccttccggtattagataaataacgataagagaagcccgtgagctatgttttatataggtactgacttacatacattcctaatctcactcacctgcatcgtaaaccggctccacgttcgagactgacggacagcattagtagtattagtacatttattaccgctctctgtagtatatttttcgcaagggctatgtagtcctgcagtataatttcgataaagtaagagtcgggatatagggataccaaaataaacgaagtactttacataacattctcttctttatttttaggttataatagatccgacacaatctttctatatgaaaaaccatttttatttgtatttaacaaattggaaatatggttttcatacgccaaaatagaaattactgtaaaaatacaaactcagctcttagtacttatcatactaggttcaataaagctcacattttgttttacaaatcaaatacactctctttacagtcagttgcttattattacctatcttaactatatttacaacatgatacttttattctttatgtaatttatctataacgataagagagatcacagaaaattgtagctggaaatcttgtgtaaaaaccctagcatactctctattagtctaccactttacatttttatcacagtggatgattttgtcaagtgtttgatatttgttattgtctcaagatacctttgcattattaccacaaaccagtttcttattacccttaaacctcaagctgccgaaaattgtggctttgcgaaaacttaatagatttcatgctacaattggaaaacattgccaaaaagaatcaatggaagacaatattggtattataaacataattatcaaatttctagttgacttaggtgattataatttttgcaggtcttcttttcagcaatctataaacaaaaatgatcgtaaactaaattaaattacataaaatgcatctattcacgaggacgcactcattatcaaataagctacagtaacgtcaatgacttctggcaacaatgtactcgcgactggttgtccaaacgcagtggcgatccattgcacgaaatattaaaacagtctctataaatcaacacatataaacttgtccttttatctaactactcgtaaaggaatttgacactatcaagcatttaatcacttggcacaaaggcaacagttttaataattttaggtccataccctgttctcaactccggatacccagataaaactgtcaaagttctctcactaaacacaatatttagaagcaaaataaacttaacagtaggcaataatctcaacaaatattgttttacagttacaaggaagacagaaaactcgtgagagatgtttgactaggattagcgggaggagtcgattgctccagtgagcagttcacaatcacatcacggtggcgcatagctgagcgtccatcattgtttgattcgagaatcattgttcacacttttcacttttgagattgaggccgtagttctcgatggagtagtcggtctcgcggtcgcgccgctgcatcatgttgtctgcgatgagtgcgctgatgcggtgcttgtcgagggcggggggcgcggggtgcgcggggtggtcggctcgcgcgcgcttgcgccacggctcggccgccgccatgctgaggtccgtgggcatgtcctcgtccgcctgctcctcctcacagtgctccaccttcacctcggtcttgatggccaccacctgctgttgcggcggcacccgggtcgggctcatttgttgccgaagcagggagatgttcttgatgttcttcagttctgtcgggtttcttaggaactggtaacagtgtcgttcgccttgcaccttccgcaggatgttgacgcggtagtagtagcgcagcgcgcgcgacatcttgtcgtagttcatggacaggtggttcttctggatgccccacagcttggcgagccccgccgggtccacgatcttgaacacgccggtgtcgcggttcttccacgcgatgtagctggtgtaccgctggcccgggtcgttcagtagctgctgaaggaagtcccaaagaagtcttccatttgtatttgattccggcatatcgttggggaagaattctctatgttgaacacgatagtgtgatgactgctgggacgcgtgagtcatcggcgccggactcgagagcggcgcatctttcggtgagggtggttgcagatggttgtcttcatcggagtccgagtgattgcttccggagctgttgttctgcgtaggtggctgactagcttgagcgtagactgacgcgtagccgttggtgtcgcccctttgtgggcttccggagctgtcgactgacggtgccgggctcaaggtgacggagttgggttgcgcggcggcggcggcggcgctgtggaagtggtggaagccgtcgacggcccacgtgggggtgggcgggtgcgagtgcggcgagggcgggtacggcgcggcgcgggccgtcggcgtcacgggcgacgagggcatgcggcccaggatggctgcgtcacgcaccaacatctgaatgacgttgtgcagaacgtctcccgcgcccgggcaacgctcacccaagtctgttttggttagcaggcaca

SEQ ID NO: 1136 - DNA, 3514 bp, Plutella xylostella
aataatatgtaaatacacctagagtacaaaagcagtctccagagtaaattcggtaacgtaacttatttgatataataaatgcattgtagagtctacttaaaaagacgattctagaagtcgctgatttctggatcggtgtctgcgtacttgcaggtgaaggggttccgcagccaggcgcagaaggagcggtcggcgtgtggcttgtacttggctgtggtgtgtttcttggcgtgcgccctcgccacggcggcgcggcgcgtggggtacgagtccagagaggaggcgtcggaatcccgcggcacggagtcgtaccctgactccgcgcggcgcgaggtccccgccgggctgtgcttaccagtccgcggggtagactcgtgcccgctgtcgtacccgtctgtcttcccacaccccgccacgcgagctatcgtcttatccgtcttatccaacttttccgggcgcggctcgctcgtcacgaccgtcggcgtaacttctaggtgcaaattcgattttaactcccgaaatgtattcagcgtcgcccccaaactcggcgcgcgctgctcctcgcgtaagttcgggtcggaagccccgtcggggtggcgcagagacgcgattcgcgcgtcggttatgtcgtcgccgtggtatttctcgaagggtccgtatgtgtcgtcgttgcctgcgtccaggtcgtggtatgctccgcactctcccaccgcactgttcggtctggacattgttcgtttgcaactatcacatattttatcacttggcctgtaggcgggctcactgtagactgacccgtcgccgtggaattcatctgtatctcgaacattacacaatgatattgattgaaacacattagatactctcgggtcgtatttcccagatttggagtgtgcgtataaatcacaaagtcccatcatgtcatcaactctagatttagatgaatgtacactttcatgtgggttaaagtcaagcatttgatcacttattgcattttctgtataaaaatcataatttctcctcaagtaagattcatttcttagctgtcgctcaacttcactataaagagataaagtgtctgtaaatgtagaagccacagtaagattttcttgactcaaaatccttagagggtgttcctcagaattctcctggtcaccatccgctaaattaccatcgtatcccatgcagaagtcaatatcttcttctgtaacttgaagacaacagtcttgcattgcgactaattccaaaggttcatctatttcaattatttctaaaatttcgtcctcctcatcatcaataggagctctacttataccgtttggaccgatttccctgctacgatttgaagctaattcatcatccatcctcattcgttctttgtatttactatctaagctttccatagatacctctctactactaagttgttgaagaagtggaagggcaggaggaatttcagctagttcttcactgtcatcgtcgtcatctatatcattcttcggtgctgttttggctgagtttgtcgactttttaggtgttaaactcttttcactactcggtggaccaacattttcttcttcgatagccgcaccttttgaaccagctttaagcccagttcgtattgtagattcttcgacatgtctcttaacggcttccttaataaatggctctgacttttgtggcaaatctgaatgatcattatttttactgccactttgttcttttgtaagctgattagctttgtgacttggagaattgtgtctagatttatgaatttgtgttgtttgattttctacccattttcgaatcatatttttcttatgattatccatgtaaccgtatccgaggctttcccctccctgtgcatttagtaaacctacttgtagagggattgtactaggttgtagtgtaataggatcgagtggcacaggaggggcttgtttcataggtccatcgatccacgtctcgcgtttgttgctttgtgtttcttttatgatatgtcttgcttcgactaatttggatttagatatccttggtccatcaatccattgttcatcactatttcctgtgccagaatgtttgcttttgccatcatccccaaatgtttttgatgatgttgttttcataggtgtggttttaggtgtatgggccggagatgatttaggagttaggttagttgaatgggaaatatttctcttcatgggtgatgacttcggtgatgaatgcaatttatgtagtgggcttctttcttcgacaaccttagacaacgacgatttatgtttgtgttctgcagcagatcctctcaaggctttacttaaaacgcatcgattatcgccagaattgatgtgggggatatatactggagggtgctctccatcggtttgatcatcatccatcggtccgacgtatataaccgtatcagctgataaatcactgctggatggatctggctcactgctgcttggttttgacgcgtcttcgccagaactaccaccagatcctgcattgttatttgcggagaacttcatttttcttctccttagcctatgtattcgagaagctagttgtaatgtagtcagagtatctgaatagttttgtacatttggcgatacatgtactatcatggctgtatgacacgtaagagatcctagacattctttgagaacatgtgtgagattgtggtctctgtacggaaggtgtcgctgtccattgaatattgctagtaaaatatttcctaatcctgatagtgggatgcctccactagttttgcctctttctgaatttcctaagtcgatcaagtgcagacggcttctccctccggccactgctcccttccctccaatactgtactggtacagatgcagggtgtacagtaaatggctgtctcttccttcttccctggtaccacgggtggccagtgctgcgtccaggtagaacgcagccttctcagcactgtgtacccggagctcagactggttctggaggtgagtcccgaatagaggatcatccctcaagtacacgcctggagactgctctgaatcattctgataaggcgcaagcaggtcccgtatctggttggtgttggtgcagagctccacggcggagaccctgacggagaacctcgtgccgcacttgtgtcgctgctcggcgatgccccggaacagccacgagatggcgcacgggatcgcaccgagggacccggccgcgtccgcgcgacccaacatggtgtaggatttgccgagcccagcatgtccgaagcagaacaggcagccgtcggtgccgttgatgacggcgtgcagcacgtccgtcagcgcactcgagcagatctccgactgagcatcatcctgagaaaaaatggcatcgaaggcgaacatcttgggcgcggccacgcccagcttcctgtcctcaggggccacgggggccgcgctggcctcgcacagggtcacctgcttcttgcgcttgtccagcgagaaggtctgggagccgctggtgaagggcccctcgccggccgcgc

SEQ ID NO: 1137 - DNA, 2587 bp, Plutella xylostella
cattattggaagataagatataacaatagaccttacttgctaattcattatgataaaaaacaattactttttaatttaacatgaaaacataagaggactttcactactgatatcatagtatcaaaaaaattaaaggtaactttatcatctaacattttgagaccaaagctatttatcacagtagtcttatttgatttacaccaaccagacactttgcttctctcaaaattgtgtgctcagttgatagcgggagccacagtagatactgccttattccccgtggcatgaagatacattattgctgtttgtgccatcgtatttttcatcttccaatcaatggctgtggctccatgagttttgatttttaagtgcgagctttttcactgttttgtactaattgcgtttactttacaaaaacagtgaaaaactcttactcagtattgcttatgggatgacaagattcaccacaacaggaggaaagcaacctgaaggacagtatcaatacactgtggcataactgaagcacattttacttaaaaatacaaatgataatgtaagatttacactaactcctggatttcggaggagtagttttacaatgttgtcatcatgcaagggataagaaacataatacatattctgtttaagtcaataaaattaatgctaataaattattcctaatgttatgattattgccataactgaccactaaaataggcaggaattactttttgagcaccagataccttattacattataaaatattcattttagtcttacatttaacgagtggcagtgaacaatggcagtatgaaaatatgatgtaggtatagtagtgtaacatttgtgacggtacttattttatatcaaaattgtatagtatgttaactctttaacaacagaacatactacaactcttcgagtggagaccatgattagacaaatgtaccatggttctccacctgctgaaatacccgactataagagctgatgacgttaattacacgttacattcaacattacagcatcaccagctcacgtaacagattcgtgcataccttccagatccacgtaacatccgcacactctcacccccacttttaccgtccaacacttcgcccctccaacccacccgctctcggtcagtcctcgaacaggccgggatgcagatacagcagcttgttgaacccccagcggtccacggaggaggtctgcgagtggaagcgccggtgcagcgccgtgtccacaagcgtgaacagctgccccacgtggcagtcgtgagcgcgcgccgcgaacacctcgcacagggcctgcacgtaccacgagcctttttccgggtcgcgccgggacacgaagccaggcagcgtggagtgcgcaatcagtatatccgagtacaatctctctggagcgagcgcgtcgtagtgttgcgcgggggcgggggaggcggcgaggggggcgcgcgccgagccgtcgtgctgcaggcgcggggatgccagcggcgccgccagcggtcggggcggcgcccagatgtgctcgtcggttgacccgcgacaagactgaaagatgaacactttgggcacgtccttcaagctgggaaagttcttgttattgaactgctctataatgctcaatatggagatgagtccgccgtcgctgcagcggatgtcggtgtcgctggtgcgggtgcgctcgtagccgtgcgacgacaccaggatgaacacgcactccgtggagcccttctccaggtctttgatcactttcaggttgcgcagcgtgtcttctgtctccttcttggacaagttattatagaagatggtctcgaagccgatctcgtcgaacaggtacttgaggttggtgcagtccagctcggcgcccgcgcggtgctcctccacgttgtggctgaactcgatgaagctgaacgcgatcagcacgccgcgccgccggctgcgcgtgcggtacagcgggatgccatctaagccttcttcatgaaatttagtagacttgaccacatgtatgtgtgggatttctgctgaagtcttgtcaggtttgctaaaatcatgcgggtatggtatttttgctgcctgtgcattttgctgagtctctgcttcctttttaataacttctttgtattgcttcagactaacaaaactagggtccggtgtctgcaaggatatactttgtgactgtccaagtttgttccgcttgtcgcgcgggtgcaggttggagtcggggtcgagcgcgcgcaccaggtcccagtggcccgtctccgtgagcgcctccagcaggctcgggaacgccgtgggcccgcgccgctcgatgtctctgtacaagtcgcgcttccgcatcctcacgtccttggtggtatccttgtaaggctctatcattgcttcagagaagactcctttttcgtagagcactgaaacaatgacgtccaaatctgtctgttccacgagggagccaaaattgcgctgtatagcctttctgtgttcttcctgcatgacttaattcagaaaacaaagcactctacatataaataaacaaattaattttaagcaaaacaaaaatacgaaacaacacaagggctca

SEQ ID NO: 1138 - DNA, 1130 bp, Plutella xylostella
ctaatttaaatatcccaattataatattttacacattcaacacgcatacgatttgtttaacaccaatcagttttttgaaattccaaagctattccatttacaaaataaaattctacaagtttttaaagactgtcacttttatgagtggccagcgtttttgaatatcgaacctcattggagcgggaactattcagtctttgtcgccaacgaacctatagacgtctgggggcggttcgggcatgcagtagccgtggtaggtgcggatgtcctcggcggcgtaggtgactccagctagcactcctggctccgtgtggtgtctgggacacgtgtggtcgcggggacactggcagaccgtactcgcgttcacctcgtcgatctgttcgtgacgtctcctcacgctgaacagcttgcatggctcctttcgtgagcaccgcagcctactgagcggcgagcacgcgaactggtactggttcccctgttctccgctaggtgtcgtgtacgggagcttcttgagtaaatacgtgacggacatctttgggcaatgacagttgacgatctgctgcgtggcgttactgtctggtaaggagtaaagggtccaagctgcgtccttgaagtaccggcatttaggcagccgtctgacgggctcgcaggtcttgtaaagagtggttttgtctgctaacgtgtgattgtcgtccggcgatagattgctagagcacggtcggtgtccgaggcagcggcacttcctctcgatccagggctgcgagctgtcgtacaggtccaccttgctgcacacctgccgcgcgcggcacatcggcagatcctcttctgataccccagtctgatagaggacttttaagcctcctttgggaggggccgacgtcttcctgtgaggcagcagcggcagtttgtctggtctcttcacgtgaagttctcccgaaggcctgaaggcttctagcggagttctgatcacggccttagctccgctcagcagccaagcgaacaagaaaggagtgagcacttgcattgtcactggcagtttagaaatctgtcttaattttttaattttcgaacgcgaaggatttgaatttgtaacgtagcggtgttggcgcgcggtgtgacgtgacgggagg

SEQ ID NO: 1139 - DNA, 830 bp, Plutella xylostella
cgcctcaggaggtcagcttcttcttttattttactccaactgtattcgatatcctcttttgtagttaatctcgaacagacaacgaatcgaatgatgaatcgagattgatatgtggccgccaccatgtacaatttcttcttagctgttagattatcgagcaggagcttcgtggttgagtctccgtccctcagccggaagcacaccaggcccatggacggctctggctccaccaggaagcggtcgtcagacctcaccaagttggcaaaatgcagtgcgaggctgatgtggtttctgatgtattgcctcaaaccctcagccccatacagcctcatcaccgtccacaacttgagggcccggaacctgcgaccgagcggcatctgccagtgtctgtagtctggcactttcacattagtatcggtgtctgttaaataaatcctctgcacattgaaggcattgacaagctcgtatcccctcttcacccacatcgcagagcagtcgaagttaaccagtaaccatttatgagggttgaaatcaaaggagtctgcatattcgactcctttcatcaggtgtctgtattctgggcagatgaaggcagctcctgcgtacgcagcgtcaacatgcagccatacgttagcttcattgcagactggtcctatttcatacaacgggtcgaaggcgcagattccagtggtacccaggttggcgaccatatagcatgggatcaggccttgggcgatatcttcatcgaaagcttgtttgacggtttctcctcgcaaccttccgttgctgtctgctttgagtagtctcattttcatgttcccgagtaagcc

SEQ ID NO: 1140 - DNA, 3158 bp, Plutella xylostella
ttctttacatcggcaatttgaatagaaaataaaataaaagtagtcaaaattcatggtgtatatcctatactgaaaacaatcgcttataagcaacatcaaaagctatttttaaattataactgttttccttactcttataagttatccacttagtgtgaaagagacgtcaatagatcgtagttgtttacagcgggtattcacccgtaattttaggcaagtcagtttaaatgtaaagtgttttgttttgtcacgcagatttccactcatattcaaaatagcatttatagctgattcacaaagtcaggataaaaattatctgtatgcttaaatgctgttactgtgtcaaaactttaggcttgtcgtcctaatagatgaatcacgagtaagcgaaacgaccgccgattcgcataagcactaccattttagtcgtctattaggacaaccccttaaactgatatgattattgtccgacagataacctcaacctagacagtgtcgactaacgtgtactagattttaaagattaaagtttaagcctctttcaaatggcgccactgagcaagctcacttgtgattggtggattcagtaacagccgccattttggaattgtggggtcgtatcggtagtgcagttatggattcaccatccgtcttcatagacaaaacactttacacaggtatcatggcaagtttacggttttatttaggttctgatgagaatgtttggttattaataacgataccagatcttttaagattcgataaaagaccacataaggcaataataaaattaattaggggactttttgggatcttatggtattttagtgcgagagggacaaaatatattgactatgtttgatattttgtctcctttatataattacttaaatgaaagggagatgtgagattcgccgaaacgcgttatttaaattctataatagaatcagatcgggcattgactagatctgttttataaccagcccgttataaagaattacaatgaaagagtatagaaatatcggttctgtatcatcataagactgagatatttgtaaaatttgagcgaagattaaatgcattttgttgaaaacattccccacccaacagtacatactatgtcattcttaatcttacccctggacctccaacttgatacaatagttagttatagactaaccggctgattgaatcctgtgatacctgccagctcccctcacatgccgagctcgccatactgcagcgaccacttctcgtaggccaccaggctgtgcggcgacaccgacggccggatcctcttcagcgagtcgaggaagtcctgcaacgtgatcggacgcaccagcgacgggtccaggctcttcacttcttcggggtccagttctctaatgggtccgagcgcggcatcgcgacacaacgcggcgaggtcgctgcccgagtacccctcggtgcgcgccgccagctccgccacctgcgcgtcgtcaacggcagacgacgccgcgccgcgcgacaaaacgcgggttaagagcgccgctcgggtttgctcgtcgggtagagatacgtagacgcgtttggggaagcgcctgagagcagcctcatccagctcatgcggcctattagtggcagccatcaccaccagcctatcagccccggccgccggtagaccgtccagttccaccaggaactctgtcttgagccgccgcgacgcctcgtgctcgcctgaagatctctcgcagaggagtgagtcgacttcgtccacgaagattattgagggctgcagctccctcgcggcctggaacagcgcgcgcaccatcttctcgccgtcgcccacgtacttgctggtgagcgacgccgccgagatggagaagaacgtggccgagcactccgccgccacgcagcgagctaggagggtcttgccattccccggcggtccgaacagcagcaggccgcgggcgggcgcgcgcagccccgtgaacagctcgggccgcagcgccggcagcaccaccatctcctgtagggcttgtttcgccgcctcctgcccagtgatatcatcccagtgcaccttcggcccgccctccacgatctcatcgagtatcagctgcacaagcttcgggtccaccatgcggccgctcatgagcgcctgcggagtccgcgaccgagtgggcgtcccacgctgggagccgccgccgacggcgcgccgaactggagagccgttgttgggcacagaaagctgccgcttgacggcgggcggcgtcgaagcaggcttcacggggtatctgctgtagttcccattagtagagctattgggctgggacgaggaccgtcccatggaccggggcagggtctggctcttcagcagaggccccccggatccgcccggcacgcgtcgccccgctgttgttagcttcttgcctgcaacaaggaagtgtagtctgtccttagccatcccgaggttggtcttcattttgtcatgcagcctctgggcccgctgccacgcgtctccgcggccaccccagcagtccaccgcgatgccccgttccaactcataaatgccttttttgtacaactctattgcaagttccttttgtccttcattctcctcatcaatcttcaaagctttggatatgtattcaaaagcttttcgatggtggtgcttttgtttagccagcagggggtcccccggccccacattgtggtgatgatgactcatttcttcaccttggatcacctctgtggacactatcccgtcttttacgatcacttctaggttacactctccattcttctgagatttgtgcattaaccgatgagtggctgagtataaatatttgaaaatgataaatacttgatagagaagagatctcaggacgttgaacagtatgatgatggggaaagagaccacgtagaggttcctcttgtgaacagaaggttgcgcgtcatttcgcaacgctgaacccttcgctaggtctgcatcggtcttttttgattttcggtttggggaccttgtggtttttcgcgataatctaccattggaatcgtcgcccgaaaccatcaagaccactaatgttaacttatttaaccacaacttccattaatttctattgaacaaagaaaagtaggcttatttttctattctaaaaacagaaacagaaagatatcat

SEQ ID NO: 1141 - DNA, 892 bp, Plutella xylostella
agcttcacatccgggaacatgtccgggaaccggtaactgagccacagatacagctcgagcacgtcgaacacggcctcgaggtgcacgaggtccatgatggtgcgcggggggggcgcgggccagtccacagcgcggcacagccagccccgcgtgaggggctcgctgcggctgtactgacggaccatcttcaagaaagtagcacaaacaaacggcagcttattattgatcggtgcacaacaaaacacgtagcgcgcgcgcagcggcagcggcacgtgctggatcatctccgctaagaacttgaacgcctccgtgttgcacatgaagtacagggagtcgtctacggtgcacaggtgcacgaatatgtccatcaaactactcaacgtagcgtgcggcagatggtacgcgtacagctccatctgttccgccgtggggtgcagcccggcctgcgccacggggtccggggtactagctagtaatgtcttcagggtcccgtggtcttcaggcctgaaggtggttacaaagccagtctcccatgcgctgccgtagcggcccgcgcgacctgcaatctgcagggcttgtgatatactgatgacatctatttctttatccccatcctcgttcaccactggcttgactagagaatagaatataattcttcgtatgctcagattgattcccaacccgatagcgtctgtggcgaccatgactttgcatgaattttcagggtcattgaacttattggcttgagccagcttagtgccgggcggcaggctgccgtatatcaccgccacttcatggcccctctgttcgatcgctcgacttacactgtaaatgtcgttcttattgaaacacactatacagtcgcccggctgcacgttgtctagtgaggata

SEQ ID NO: 1142 - DNA, 2780 bp, Plutella xylostella
cgtgatgtctctcgcgaatacaaagtatagacaaaatatttcaaatgtaagtaccaacctaaagattctaccaagaaattatttttacgccatattgcagcctggtattacgtctactccgttgtgcttagaaaatgttagaaaatacattacatatcactctccagcaggccagcccggcgcggcggactcctctcacagtcgatgagctcaatatcgtcctcctctttcctcggcctcaccgtttctcccattacattattcgctgtctttttgtcgtcatccagcttgagtatttcaactgtcactccgatctcatccttgtcagccgccgtccggctgggccggcggctgggctcgtgtcaggtggcctccagctctatcaggtctccgtcgtcatcggtgagactcttctcggccaatcggaagctctctaggaactcgttgaggtcaacgaacccgtccttgttgatgtccatgagccggcagatgtccacgagttgttcctgcgtcatctggttcggcatgtacttgcccaggatctggcacgcttctgaaaactcctccagtgtgatgaagcccgaattgtctttgtccaatatcttgaatattgcttccaaactgcttttgtttttgtacagagtttccacgacggtttgcgtgtcggctttcctgccgtttttagaaacattaaagtcgaaagtgtccatgtagcgcacccggcgtgtgtctgggtcggtgcggaccagcttgtccttgagcatccgccagggcagccccaggtgagtcacctgctccatcacgtggcaccagtcgctgattgacacgtagccgctctgctccgagtccaggttcctaaacgtagcctccaacggccgccgcgccatctgtatctggctgtgcagttcgcgcatggctgaagactccaccagccccactcgctggcggaaggtgagccgcctcgtccgcgacaccgccgccgtgtactgcacgaactgacgctccaaggagttcccgcacagcttcaggtatgcgcccttgttggagcccaactcgtagtagttgctggccgaaaatatcgttatcacattcccattgtgcagtatctcatacccgcccggcttgcactcgtggctgcggaccagcaggctgagcttgttcctctgcaggaaggcgctggagacatcagggccgaagtaggtgccggcgccgcggagggcgttcgccacacagcccccgccgcactgcgggtccgaccacaggatgtcgaacacctgcttccactccgccttgtcgatgacctccgcgcccggcgcctggctgtccgacaccggcggacgcagcagcgatatgtacttctcccggtcgaggctgcgtatgacgtcgaggtcggtgcagtcggagatgccgccgtgcaccacgagcacgcggttgttgatgacggcgccgagcggcagccagcggtacacgccctcgatcagcttgagaagacgctccgcgttgtgcttgtatttctgatgtacttctttaatgaatccgtacctagagttcataataaggtcctcgtggttgcccctgttcagatagactccgccggggaaggccagcatgcaggccagcaacagcagaagtacttctagccccttcttgccgcggtccacgaagtctccgttgaagatgtacgggttctccggagacgggaggccgttcttatggaatataacgagcagatcgtcgagcttcccgtgcaggtccccgcagatggtgatctggctggagatggaggtggtggcggcgtggatgttgggcagccgcttcagcgccgccgtcgcctccttcaggatctgcgccacgtgccgcgcgtgcaggcggtgctttttcttccggaatgcctctatgagtaggtcgatgtccttcctctggagcgggaactcgatgtccggcccccgcatgggcttggggggcgccgtctcgtccacgcccccgccctcgtctgactcctcggagaagacttgctccaagacagacgcggtgcgcgaggtgcgctcggaggaggtgcggccgctggtgtcgcgcatgtggctcagcagcgcgttgaagaagttgtacaacttgacctggtcctgctcccccgcgtactcgatgctctggaagatggtccaggtgtagcggcggcgcacctccatgcgcgccaggtagcgccggtaccactgctggatgaggatggccgccttcatcgttctttcagccttagtcatgctgacgtcatcgcggcgccagaagcgcaaaaaaggcgcgaacgctttcatagtgcactctccgttgagcaccttcttgccgagtttcttgggcacctcctgctcgatctctgagctgcgacacgaggaggagtcatcaccaatgctcctggcgcgtcgcccaccacggaagctcacacacccgcaaccctcgctcaacgaaaacattttccctgagctctttgtcttcttgtacttcttatcttttcgttttcgcgtacatcgcggcgacttttggcgttgcttaggaatattgactcgtccgcgggaataagaaatatgttttcatggcccggttgatgctggtgtcggtaactccagatgcaagcagatccaacaaaaaatacaacaaaccactaactattcaatttagagtcacattgggatgcaagtccgaagatatctgaattcaaaagttgttttcacgtaagttgaaatcgtcgaaaccgggcgattctacacaaccggccgccgtggaaccgc

SEQ ID NO: 1143 - DNA, 2306 bp, Plutella xylostella
atcaacatcatacattctcatacacacagatttgattccttacaacatacaactgtacaagttattgcggatacatacattgcttcatttttaattagtttatcgtataaaaggagtggcaggaaactttacaaatctattttaaaaataaaagcaacggaaatgaagatcaaaacactcttttataaacttagaccacagcgttgtatcagttttaataaaattacataaatgctgaattggaatcataagtaattcggataatatataaaaaacacgataaataagcaccaaaaaacagattcagtatattgtaatatatttatttctatacaattttacttcacaccaacattgcacataatggagtttatatttacgttttatcttaggtttcaatttatgtaattgctttttacaccaattaagaggtagttttgatagagagatatcaaatttgaagaaatattgctattatacaatatacattattaaagtacctatgtagtatacagttatagcgaatcaaaactcaaactttgtagaaaacagacagccagagaaacaaaacattacaaaacgtataaaacactgtatgcctctttaatcttacctacacatttacaataataataataataaaaacttttatttacaatattttaaatattcttttaaacctacacatttttacagaggaactaaacgaaaatcaactacgaactctactgaccccaactacttaaagaatcactgtttgtccgtcgcgcactcactcaggttgagcagactgtccaccgtcagagtcttcttgtgctcgtccggctcggcgggccggggcgggtagaaagcggagacagggtcgaacaggtcctggcggtactcgtgcacctcgctggacgacgtgaccgcatcctccgccggttcccgccccagcccgagccgcccgcccggcgcgtagggcgggaggccgtagggcgtggatcaggccgacgctaggtggcgccacatcgtgtgtcacatggtcgccatgtacggccaggagaaggagctccctgacagcagcatatccctgatgagtgtttctatcggggtctttccgacgaggcgtacgaagaagagctgctcgatgacttgtgagctgacggtgcggagggaggggagacgcaacaggagcttcccgaagcgcgtgggctggttggggtactggttccggcagtactcctcgagggcacactgagacttctcctgcaggctctcgatctgcggcacgtcggacagcccgcacgcgtctgtcgtgaagaggacgatcgccttcagacaggagtactccgcggagtccacgtgcagcgccttgagcttctccacttgctcctggaagatgcggatgtggtccatgaaggcgaccactcggtcggcggccatgggggacgcgtggagccccgcggcggccagcaagggagccacgtggagcggcatcgagcactgggatgcattgagcacgaacagttccgaccacactagccggagcaaggctacttgatccgtgacttgcagttcagggaagaaggggatgtttctcgcccattccacggcggagaacaaaagacgagcggcgagttcgcagatgttgtctatgcccatgacgttggtgggctgcacgcactggccgtagcgcgaagtggggtagggctcggctctcagtagtaaggagatgtaggaggtgaggtaggggtggctgttcagcccgccggccgggtccccgttggtgagagcgaactggccgggtagtgacaaccctggaggttgcgaagggggcactcgacctctttgcacggcttctctccgcatgcccatcttgaggcatttcctgagcctgcagtactggcactgattgcggtggtgctggtcgatggggcagttgcggttccctcggcaggagtacgtcaggttccgccgcactgaccgcttgaagaaggatttgcagccttcgcacgtgaactggccgtagtgcttgcccgaggacttgtccccgcagacgacgcactccacgttctgccccttgtcggtggccgaggagccgctctgcgtggacgcggcctggctcgccggcgtggacggcagcagctcgtcctcgcgccacgacgagcggaagcccagctccagcggcgggaggtcggggccccgcggcggacacagcccggggccaccgaccccgccgtacactaacgctccgtgcgtgattgcgccggttcacttcactaggtcacgagccgggctcgcgtgtgtcaggggtcgcgattgcg

SEQ ID NO: 1144 - DNA, 1931 bp, Plutella xylostella
gagtctaatacaagaaacgtttagcaataaatgattacttaacttccttccaagcattttaaagcttataaaatgcacgaaattatttagaaataatgacagtgtattaactaacgcttaaaattgatacaacctatcatttgtaactggcaccagtaatagcaaataacagaagattaataataaagatcatcagattcagttaggtattatggcagtactcattttcgtttcctaaatacctattttgttggtttacctatctaataaaagacactggtttaacattttatgatatcaaagctgtcgatttttaaactaggtcgatttatctttcatccttttgaccatggatttagcaagacattgcttgtagacgtttttagggcacaaggtatgtagctgaataagatatttttacatctcaacaacagcactaaatttaaagtgtgccttcaggatcgactccattgatttaaactcaagcatcatcatcgatcacccataatacatagcgccgatagatagggatgcgttaatcacggccagtcagcattataaatgccagatgaaccaataaaaatcgcgctttatttaacgtatgaatcccttagaataagcagtcccattccagatacagaaaccccaactctatactgcatccgattcccattcatacattttctcctatggtcattcaatcaattcatttaacacaacatcatcattatcacgcggagagtttcccaatcctgtcatcaagtttcttgatctctctctgtaggctgtcgacgttgtgtgcgaacacttcctggacaccctgtagtagctccttgttgttctgcaccccgcccgcgatgctggcctgcagggtttctagctccatcagggatttgctgaagttgctcgcttggttgtgaagtgactcgagcgcctccatccgctccagtatctccgagtgtgagatgccgtcgatctgtttcagcagcttgtgtagctcattcaccttagcatcagcctccgggtcggccggcctaacagcggccttcaacgcgtcgacattagcgagcagtgacgtcactcgtgcgtcggcggccgcgagctcgccgggacgcagcagtgacgcctgcgcggcgagtgatgctgctgcgccacagagagtcgcctctccggtggcggcctgcagtcttctgaaggcttcctcgtcgcgcacgcccgccgcctgctccagcttatgtaatctgtgttcaagttgcgcgatccgcgtggtctgcgcgagcgccacctcaggccgcagcttcaggtgagtcaccgccatctcgcccgccttcttcttgctgccctttgataagtattccttcaatttctcagccttcggatctattttctctccctcgtccagcttcagttcctccagcagcttcttggtggagttgatctgcgccgccaactttgtgtgctcgtccttttcactctcactagctttgttctgctgctcggtgacttgctctagcagctcggagaactcacagcgcaggcggttgtacctctccgcgggggtctctggctcgccctcagctgccaactcccattctcctgagcggtacccaatcctcgtcttcctgctgagccgatcagagaagtccacattcccggtcaggaacttccccttaaacttgttgaaggaatcctttacggacacgtgcagctgctcgatgcactcgttctcctcctcctcgtagggctccggctggtcggcctcgggcaggtcccccgtctcatatacatcaggctggtcgtaggctatgcccggcaggttctcgtatttcggatctgccatggttatttgatcgagatgttgataagatttcgtgtaattcggtgtaaataaatgtaaatttgaaaatttgttaaatgcgaaatgacgtcac

SEQ ID NO: 1145 - DNA, 1019 bp, Plutella xylostella
gcgtgaggccgcttgcggagacgctggtctagggcgttatcatccggcttaggcgtggcatgattgctcacattagggtgtatgacgatgtcgtctcgccgctccactcgaatgcgggacttgctctgtgaagacgtggagaaacaaccctccgagcctactggagctgagcctagggattcattaggatccagcgcatgcgacagcggtatgaacacgggcgtgatgcgtcgcttgccgtccgacgtcctggtctcgatctgtcggtccatcggcctcagcggcgtgatgggcgacgaggctgggagggcgccttgtgatgtgggtgtggtgggctggggttttgtaggcgtgagtttgtggtcgtccttcacacaggtctccctggccagcatgatctcgggacactccagcagcaggttggctccggccagcgacgtcgactcggtcgacagacacttgccgtagatcttctcgtagaatgcattcttttcttccagtgtcagtggtgtcccgatttctttatttgtgaactgtatgcatgccactgatccatcggagctgcacgccagtaaattcagtccgtcggagctccaggagatgtcgagcacgctgtcagtgaacaggtcgtgcaccaccaccagggggcgcttgagcgacgtgagccagatggacagcgcgcggtccctcgagcccaccgccgcgcagcaacacttcttgccttctttcacgaggatgttgctgttgaagcgtgcacaagtaactgctttgcgatgtccaacgaagtctttatcacatcgccagccatctcgctccaccacctgcgctgtgggcccgcctccattcatcgcgtgcgcggagaccacgtactgcccgtccggagaccacgacagcctcagcacgtgcgtcgtgcctccacattcttcaaacggttctgtgatgatggactcctgcgcccagtccgcagtcttccacactcgcagagatttgtcatctgactgtgatgccaaatactttcc

SEQ ID NO: 1146 - DNA, 3274 bp, Plutella xylostella
atcagctgattgtagccttcgacaaaaaattattgtgcgtggtattatagtgaaagattattaattttaatgctgttcagagctgcttagttgtgtttggtactaatatcattgtattcctaatgtgtttctagtagaacgtgtttattaaacgtctctcatcactgtgaaaaatgaagtgcgtgtttaactcgttaaatattaaagtgttatctatcaagaggtaaacagttgatggggaacaatggatgatgatgaagcagacctgcgggagcagatcttccacaacaatgtcagggaacaaatcatatttctactattgttcatattactgtacctcttctcatttgtgctgattgagaagtttcgacggcgagatggtgaagactacttcacgggggacgaagatgaggtgaaggtgtaccgcatcagcctgtggctgtgcactttcgcactggccgtctcgctcggctctgcactcttgctgccggtgtccatcgtcagcaatgaagtgctcatactgtaccccaacagctattatgtgaagtggctcaacagctccctcatccaaggtctatggaaccacgtgtttctattttcaaatctgtcgctgttcgtgttccttccgttcgcgtatttgttctcggagtcgtcggggttcccggggtgccgcgggctgcgcgggcgcgtgtacgagaccttcacggtgctggccctgctgggtgtcgccatgctgggcctcgcctacgtcatatccgcctggctggagggggaccgctccagtattgatgctttgttgagtctatggacgtacctgccattcctgtattcgtgtgtgtcgtttgtcggcgtccttatgcttctcgtgttcacccccctcggcttcgtccgtctgttcggcgtggtgggcggcgtgctggtgaagccgcagttcctgcgcgaccttgacgaggagtactacgtctactccgcggaggaggacacgctgcgccggcgcctgcgcaacgccactagcacaggcataggctacatatcccccgagcccatgtacccggaccgcggcgacatctcggccccgctcgacatggacgtgtccaagagcccgggcgcctgcaagctcgcgccgccgctgctgcgcctgcgcaacggcgccctgcaggctgggctgaatgagcggctgaggagcgttgttgggagacggaaggaagtagaaagccaacgcaaaacctcctccctacaacgcaacgtggtgtaccctatcgcgatgctggcgctgctggctctgaccacactgaccgtgctgctggtgctgcacaacacgctcgggctgctcaccggggccaagtcgccgctcaacacgcgccaattcacgctcggcctcacctccctctcgaaactaggctgggcgggcgcgaccttggaagccttcctcatcctgtacctgcagtgcgcgtcgctcacgggcgtggggaccacggcgcgcgcgctgcacgtgctgcccggcgcgggccgcacgccgctgcgccggctgatagcagctgaggcggtgttgctgttgcattgtactgcgcagccgctgctcgtgaagatactaggtataacaaacttcgatctgctgggcgagttcgggcgcatcgagtggctcggcaacttccgcctggtgttactctacaacgcgatcttcgcggccaccgtcacgctctgcctcgtgtccaagttcacggcgagcgttcgccgcgaactctacaacaggttcaagtggataggtgaactgttcaatcctgagcctgtgcctctggtagcagccagcctgacgccgaggccttccgccgatagaactgccacccttgccgactccaacttcgaccttactgaatctcctaaagagaaacctgattaatttcatggcacctaaacctttgaatattttgtatataatgagatattttatctgtgatttgtttaagtacctatacatatttttatgcatgtagctagttattataatggcttaatttacagccgatttgtaaatattattttataattttattattaatttacatttaatgtgtttctatttttgtactgaatttaagaaatttaatatattatattaccctgagctattcaatattatgtaccatacaaaaataattatatttattttacacagatagggtggagatatttattaaatcttaaatagcttagtttacacctaaattattcttccaccatactactgtcttctacctcacttactgcattcacttccatgtacagcttcccgctccttcgtccctttgccttgttaattaactgcttagggttattaagaataagctttataccttcgttactgtttactcccagtaagaaacccaagttaatgacatcatgaatgcctctcacttgtgctggctgctcggctccactagaaagtatcaagttcttggatttgccaacagcgtggtagttatgagctgtacttattatatttttcctggcagttgtgtccttgatagcggccgagtacataagttcaaagaaaatcccacgttctgcagcttgcctgtacagtttacggctaactttgaaagggatccgagtttccggagcaaatgtaatgatctcaacatccatcgtgccacaagcatactgaaatgcctggagagtcttgggtaacacagctataatgtcatatttcttaatgttttccgactgattaatcttaagagctatgctggcatctgatatttctatagttaccctttgcaaaatattaagtttagagtttctcttaatatcatcgggtaaaggaactggttctgggaaataatcctgtttttcccttactgctcctttctttttctttttttttgggttcttcacaaacttcctcaacataggtattcaaggccactgtattgaaccctaatttctctatgatttgcaactgggttagatcgaagtttttgctgatcgaaagatcacagtaacctatttcttgtgggtccattgatgttcaatataattacgtatcgtcagtaagtagctgtaagcaatttaattgtaaatattcctcttctttaaaaactttttctaggttatgtatttgttgatgtctgctgctctgcttttgtatgtctgtctgtggtctgtgtcaatgtcatgtcagtgtcagtttgtgtcctattctatcactgacatttcaccacagagtactacaccttaagatgccgacacattatcggacgcggctgtcagccgc

SEQ ID NO: 1147 - DNA, 9612 bp, Plutella xylostella
gttgtttaattttcgatatatttcttacaaacatagtggtactttttgcgagtttcgcgtttctaaaatagttcataattcgttaaaacacaaatattcaactgcattgaagtatttctgaccaacaataacttttcacagccttccctatcctcgcttttttcttctaataataatcacttcttgatttcgtactgtatttcaaaaacattgtaagtagatagtaaaacgaaactgggtaaataataacagacaacataatttttaaaatacacctaaaacagctagtaacataattctatttttttaagagtgaaaaaattaactaacctggcattgcatgtatgcattataaagctcttccttaaacattctcaataaaacatacttcaatgcagcaaaaaaaccttaaaattaacatacttatttacaaatgaaggggttttccttttcgctgattagtgttagctgataattaaaatatgcttatacaatgtaaaatatagcatgagcaattgagcatgtaaagctgcgtacagactggcccaacgaacgcccaacgatggatatttatcatacataatacagggcaaattgtagcaacgaaggcgttcgtttggcctgtctgtacgcagcttaagacatacatttggacaatcgggaaatgtaatgctaagattaagttactattgcagatctttcaataaggagtattatttaaaacatcgagataaatcaagtttcttatcgtaagttaatgggcttacaaaaatccaaatttatattcaatccaagaccagcttagtgggtaggcaaatgttactgtttaattttaaatttacagaagaaaatttcagtgtgaatacgtttacgaaaaagcgttttttatacgacacatagctttaaaataagtttggcagtttgctttgaacacaggtttgagatagtacctatacatttaaatctaggaacgctggttaatgagattgaggatattgaatgtttccttgccaaagctaaaagtaatatacctatcatttcagtcacttcctaaatatttcatggcttactgatataacttgacagaactatttttacattggtttacgtaataggcatgactaatggtttatttaaggctttaatttgtaacatgtatgttggaaaggcaaggtctgaaaatgcagcagttatgttgaataaacctagtcaattttacacaacgcatataacccttactaaattttattttacatactttccgggcattattttattaccattctcgtatacgttacacaaacttaatctttacacccttcacaatacaagtcaaaatggaaaaccagtccacgacagtctcaatactaaacctatatgtacacgaaccttaaaatctaaccttaaatccgtcaaattcaacacaaacttaactttacattcagtcgccgacttcttcatctagcttcatttttttcacactgggcgcttcaacatcaccgttgtgtagtacgatttcttcggttgaaaaactgactctttttctttttaaagctttctgtccctctttggcagtcttctcttctctgtctaagctgctgagtctaccgctgcattcagaatcgcttgacataagcccgttggttgcatttttaattattaaaagatctttctcgatctcggtgagttcctttggtttcgttcgctctttcctcggctttggcactttgggtttgttagcgctcggtgattcttctgctggttttcgtttcttgttgtacgttctcttgccggttttcgggttgatattcattgatttctttggttgcgcttcttcctgtttaggcttggccccgatgtagcccgagcagcgcttggcgccgcacatgcagcgcttcttgtcgataccggcgcactccaggttgtagttgaacgtcagctccgtgttcgctggtatgtcgtagagcgcgaacagccccacgcgcacgtcgcccagcaccgtccacttctgtgtctcgcagttcggctcgcagctgtggttcatgaatctagccacgttccctttgggcccggcgtcgatcatcctgtccttgtctagcgtgaggtagtagtagttctcgtctcgcacgtggtgctgtcgcttcatgcgccgcttgaactcctctatgtcgatcagctcgcccacgtactctatcacgaactggccttgtttaatctcctccagagtccgcagcccccagcctcgatgcggggtgcggtagggcgccatcttggggtacacgcgcttctcgaagcttctgttctgacagcgctcgcccgcgcggcatgtcggcccgcactcggttaggagcattctgttaagacagtgcgagtacacggagcacggggcgacatctcgcgggtcgcactcgcagctagtgagcgagctctcctcatcatcagtcctcttcagcgccgccgtggaacatggcttgttcactttgagcttcacgtagtgtgggggaaggtaggaggattggatctcggctagctcttcctcgtttggtggggcggtcttcagtatctcgcaagctttgtgcgcgtgttccatcgccttggtgaatgcttcgtcaatctttgacttctgactagatatcttgccggtgtcaccttcctgaaacgggaacacccggcccctattcacccagtaatggtcgtactgtccgaagaagcgcaccacgaactctccttgagaatgtttcaccgccatgatgttgtccgggatctcacacgggtgtaggattatgccgggccaccatctgtaatgacccagtttcacccacaccatctcgccgtacagcggcagtcgtcccgtttcacaatcttcacacatgtaatttccttcaggcggtgcgatgtggagacactcggcgtggaacgaggtggggcagtactcgcagcagatgagcgtgccgccgagcgcgcagatgaagcaccagcccgtgttcacgtggcacgggaccttgccgggtctgtgctcataatgcctcggacatattatatgcgaggcgctgagtatagtggagccggcgggtaaacacttgttgaaggagtggtaggtggccgggcagcgcacacagcgagctagcttatcgccgctgaacctagtcttgcagcctctagggtcgtcgctgacgcaggtatggcacacatgacgtggacaggttatcgcctcgtaatgttcagatatcttcttgttacttctagaaggctctccggagttaaactgcgtttgaggccaaaactccaggcactctaaatggtagaacttgtgacaatgctgcagatgacatttctgacgtgtttcgacgccatttttaggcgatactggcgctttacaaacgaaacataacggtatgtcgcacttttgacagtcgttgcatttgaaatcggaatagtcggttttgtcttccttctttacttttaatttgacttcgactatttcacacttgccagctacagttttgtcccatttcagttcgtcgtccgaattgctcgattcgtattcgacatcgttttcttgttcaagcatgtctttcattttggcttcgagctcagtttccaaggttgcggcgtcgatcactatgttgtctacgttatcattttggtcttctgtttgtgacttttcgtcactttggctctctgagtcgtctagactctttggttttcgccctcttggcttctttttcttccttcctttggtggcttgttgcgcggctaacacctcttccacctctttcttggtgcattctacatggaacattcccgcacaggcgccgcgacacttcaccaaattgccggttttctcgcaaatttcgcataccctttcgcgcactaagcctttaaatacgtttggttttattcttgttaattcagagaagaaaaactcttcttcgtcataccaagtttccatgtctgcgtcttctggttgagctacagtgtccacttcctcacctgtaggtaccgattgttcttcattgtttgttggtacttgatcagaaattggttcagaatttaagctggacccatcagtaggagttttgcttttgctcttatttttaaacttgaatatttcaaatatttccaactcctcttccaagtccatataattttcgttatagtaagctttagcaactttgcgctttggtttgtctttcggaatgatttcttcaatattcctttcatattctttttcaattttcagatgctttttcactttttttggttgtactgaagtttcattgccaagccctttaatgagattcgattgttctatttcatcactttttacagtctcggattttttctcttcttcgtaaagccaagttttgtacaaatatagtgtaatgtcgtctacgctaacatgtggattttcatcaaataacgcatcttgacgtagttctaggtatttaacaaactccggatcctccatagctgcatttaagtcagattttgaaacatgtttatcgatatccattttgactttcgcttttttcttagggcgattactttctgttttagcaatagattcgtcataatcttcagtgtcacttttatattttgaatcagttgtacttttcgatgcgatttttttggttatacatgggactgattcttttataccattaactttagctggtgatgcaattttggcaatggcaatgtcgtcttctgaatcactgtcattggacactggttcaggagttactgtctgagaactaaactcggaatccgttaccttttcaattacccatgagtctttattttcttttcgttttatcctgagttttctcgtcttatgtgatgtgccgttacttagacctttcactagattagattgttcaatatcatcgtttttaacagaatcagactttaaatcttcttcatacacccaagtcttgtacaaatatgatactatttcatcatcagtgaattcaggatattcatccattattgcatcacgacggagttctaagtactttaaaaattctggttcgcacttagctttcttaacttcactgcttatttttatctttttcttagttttgcttttggggctcctttcattggtattatttaaagagtgtttgtccccagcttccttacacttctgctgtgaaattgctgctaatggtaaattatcttcaatagtgctatctatagacatggtatcagatttcaagtcattaacttcggtaattttgagatgttcgtattcatcgtaattttctatctgattatctaaaaaagtaccctttactgagcttgattcattatcttgagcatcaccgtttactattgtgacggtatttttgtcaacacctgattctgatatatttatagtactcccacttcctaatacatctggtgtagtttctttattaggcttatcaatagaacatgtgacgtcattaatgtatgaagtaaagtcgtcatcaagtttcctgaagctttccgagatctccgctgatgtattttcggcaacactattgttatcagatgctagttctataagggttttcactggcattacattatcttcaacatcatcaaacttaccttcaaagtcttgtgtaaaagttggactcatagagccattgctttcaggtggatgttcaatattactgtcgaccttttccgtatcatgaatattagattcttctgtaggtttagtgaactcagcatcactatcaaatccttcagtaaaagttggactcatgcctatagtattacactcagtggtatccatagcttcttcaattgttggagcattatggatatgctctattttgtcagtttcattattcattaagttatctgtattatcttccttcacaatttcattgtttacagtctgcctttcctcattgcaatgttttgtttcaacctcaggttcttgttgggcatctatggcaatttttccttctattgtagaattttgatatatattctctgtaaagtcagtttgattattcacgatgttatcgttatcacattctttaacaattatactgttttcagataggttctgctcattgcaaacgttcgattcaaagtcagggtccaaattggtagctatcggtatagtttcttcaatttctaaatcttttgtaacctctgtaatgtcagttttattattcactgtgttatcggtatcctctttcacaatttcattgtttacatatagattgtgctcattgacctctttagattcacactgaggttctatatgggtagttgaatctttctcaatactggaagtacatacactttctttatctgcttgaggttcgataataatatcaaagtcttctgtgaaggttgggcttggatttacatcaatcaagtcaccagtaactttagagacacggatgacattttcacattcttcccctatttgctctttcataacatcattgtcatcaaagtcttgtgtataagttggacttgagtacccattgcattcgggtaaattttcactttctttagatatttgataatcttccacatctttattagtcttggaggctgcgatatctttcttcacgtcactctcagaaacagaattattgtcatttttttcctctgcaggctcactgtcgtttttttcaacatttttttctgactggtctgttcttgtagtttctttaagtgaactttcggtaccattactatcgattccatttacttgaaactccgtctctgattgagcatctgattggcaaactttatcattatcaactgtagtatagactggttccacaatagtttcttttgaaatgatatctatgctttcactattatgagtaccgtttagtgtgggttcggtttggtttttgtttgtttcatgattcaggtcaccattaaaatttatgtagcatgtttcttgtttagattccttggtgacaagttcggataaagatggctcttgatctgacagcaacttgctattaatgtcactttccacaactttgttaacttgttcattgtagtcacttatatcttggaaagagtgtcttagacgtaaattatattttctagtgggtgttttaacttttttattgctagttactttggggctggcagaattaacttttaacttttcaggttcgatggctatgttagatgcactagtagaaagtctagttgatactgaacaagatttttttttagaagccgggctttcctctgaacctttatactctgttaaatggcagccctctaactcttcaattttaatatttagattgtctgcttctttattttcttcatcagcaacaaaatctttcgcgatatcttttgatgagtcgactggatcaacatccattggagtttctctatcttctgccaatttatctgcgctatcttcactctttatgttatttactgaatctgagacaacaatgtcatctgttgctacagtcatttcaatgtcaacagttgatcctttatttgtattactatgatcaaaaatatcactaagactttcaaatctagttatggagccaacgtcactgacagatttatctttattttccgtttcagtttcctttttagttgaatcattttcagggactgttatttcttctttagctgatttagaataatcatgttcatgcatttgtaatgcggtcattattcttattgagctcaaattatcactgtcactcgaatcggcaaacgatctccgtaaattataattcttctgtggcgtattctcttttgagattgtctttttagcttttttacttgtatttctagatatatcttttattatgttttttatgggagtaaataacttggttggtagcttctcaggagttttggacttggctttctgtagccagatatccatgtgcgattgtttctgtatcattgatatgcccgttttcgcggccatgttatctagacaagcagtcactacttcggacacatcaagagatgtctttctcaaccttctcatcgaattatctgggtcttcttttgtgtcatcttctgagaataaagtatcatacagactctcgcttaaagacacatcactgtctgttctagtaactttgttacttctttgacgtttgggggtcattttggtgcctctgattttgtgtatcagatcgtaaagtgcgtctattctgagtctctttggctctttctgaatagtttctgcctcttgaactgaggtgttccatttggatcgtttcttgtccgatacaaagaatgctgcatagaatcttgggtctttctttttgctctcgggtgtgaaatgcgacctggtgtcctcaaactcctgtagtcctgagaacttgcgcagcatgttgtccacgatccagccgcgacgaccgttgtccccaaagaatgtcacgtggatgacatccctctccactctcccaaataacttcttcttcacaaatgtatcactgtatgggtctcttgtgacaatgcaaggccaaaatgggtatgtccccactctagcccatgctaagtctccaacctggtatacacatttagcttctctatcaaatatctcactctttgacaatggtgcttcttttttgtattcttctttcttcactttaatacctccatcaaaattgagggttttcactactgataaagtttcgggaaatccattttgcttcttcttgtcattttgatcaggcttgttgaagccattctcttccattgacctttctagtacgaggttcaaatgagtcttagtagatggtctagcctttttagctgatgaagacatattttcggtaggggaaaatatttctttcttcacctggttttgtatgaggtctttcttgacgtaaaccttatttttattcatgggtgatttagatgcactgccttcggatccaaaacggcttaaagagatattattggtctgaatagtctcaatggtaatgtcaatcttttttgagtcagtggaggtttcattgggtttagtttcagttgagccgggggcctgtgttttgcgcacgggggatgtattgggtgttgtaatttcaattttgatgggttctggatcagtcttcagtctccgggaccgcccatagcgactggtgctgcccgcagcttcaccggtagtcactggagatgtcactcgagctgtcagagtagtctccaactctctttcaatcaatgaacgcctctttggctttacagccgccttcgaaggagttgtgctatggctgctgacgcagttctcatcagtatcatccattgtggaccttattacagcatcaccgtaatataatgataagtagccgtccgacaatcctcaatttgcaatctagggtgatagaggttgtgttacatacttcatacgaatatatcgaaaacttggtttccttattttcacggaacctgcgggacttggtcacaaacttatattattttcacaatgcaatcggcgtctatttgctgaaataatacctttaatctgcagcgtctatttatcgtttgaacaaagtcctattttgttacgcgaaaggagctgaggaagtcacacacgcgccattattgttcagttctaccaatctctattattacaacacagttatacaa

SEQ ID NO: 1148 - DNA, 3076 bp, Plutella xylostella
gctcagtctgacaataagtccaatcctgttctctaaaaaatatttttataacattcaatataagttttactactatatatattatgcaatttatttacagatcctttataaaaccactttttgaataaagcttagatattacaccaaataacattttatttttgaagttttcttacattttttataaaaagaaactttgaaaaagttacaaaaccaaacaaccatcaaaagcttgaattgtgcaatattttcaggtcaggcctacttcggctatttcccttgatttatatcaagttgtgcatcaaagacatcaaacagaatttaaagggctaaagaagaattaatcattaaccttcacaatgaacattgtgttgaaagtatttgattcactaattaataaaataaaaagtcaagtgtgcaatttgtgaaaaaataattgaactgtgtgtctctaggactaatatttacaagcttctatatcacagcttacaacttactattacaatgctaaaggtcaatggaatcctgattcgttttagcaatatttcaatatcttaaccactagaaacaacatggcaaaaattgcaagaaaacttttgttttcattcacaactgtaacatttacattaactttaaataatgtaattgtattttaataaaacttatttgactgccttcaatgaatttgaataaccatatgtatgaataaagtttaatcttctgtataaaagaggaatgtagaaacaaaatagattattgcaatacaatatagtcattgattcattgaacgcagtacacatgtacatattatatacgaacttgttcaacagctacaatattcacaacagagaaccatgtgttggactaaacattgactgactagtacaaactactgtttccatgtatttaacacattaaatctgtaatcaactatactaaatcaacttataacattaacaataaaaggaagcatcaatgttgtgctatttagggtatacagtacaaatccttccggcacataactaaataaaatttataattaaggatactttttaacaacagtttatagaatcgtattgcaagcaatttactaacttcgaatgatattgatagaccttcaagtcctattactaaaatcaatgtctattgtcgaatagcaaatctatttttggcactttctatgcgtgaaattttggttttaatgctggcatcactggttagtgagcgactagattttactgactacattgttcaacaatttgctggtttatttgccggattaacataatttttacccttggcacgttacatctctattatttaaaaactatatttcagttctacagggtaatatttagcgtccccattattctctttcactacgagtcctcagatcacagaaaacaggagataagttttgtacttatttactgaattagtatttaattactaaactaataagtttcaaaattgtatataggtaggcctgctcattgccacggtagtaaatccatagttttccctttttgtgaataaatatcattgttttaagtgcaaccgaccaacttgttataagacaggcaatcccatcccctatatttctctaatctgagcacaaccacagaatccgaggacctctacctccgctatactcacacaagcgacatagagagtacttctcgagccatcactactgttcactcgctgtaccgcgagtgtttatgtgttctcgtaacattggttgttgaaatggtttgtgaggacgtatactaccgcttcgtacgtcgacatcatgatcgccgtgttcggtatttgacgcaccagctgtgttcccagtcccctgtagacgccgcgggggccctcctccagccacacggtgcgcagcgtctgccagaaccgccggtacttgtcgccctcctcgcgcagccgcgtgcgcgccacctcgtgcggatacgctatacaagaggccacagtcttggagaaggcgccggcgagcatgaactcggcgaagtcccgcggcgacttggtgtcggagggcgcctggctgcgcgccgccaccagccgcgccttcacgccctcgtagaggacgaaatggaccacggtctcgctgatgcccatgtaggaggcggttatgcctttgtagaagccttttatgccagttttggcatatatcctcttgatgcactgcatggtggtgacgttctgcccgtcgagctgcagccgcgtcttgatgaaccagatcggattggtcatcgtgcacgacacaaagccagcagcgctagcagccgacagatgcacgatgggcgtgtctggggcgatgttctggttgaggatcgccttcgcctgcgagtatgtgcagaagtagatggcgcgcgacggagccacgcccacgatgttggggccgaggcccttgaataaggctttggggccttccgtttggactatgtgcctgatgcactgtatgaggctcatccttgacggcgggcgggcgtaactgccccgggcgcacggctgcacctggcaattgtacgacatcagcatacggtcggcctgggtgctatatgcaaacagcgcccccatggtcctccggtagccccatttggcctcctgatgcttgggtattttggagcagactcttcgggtcttggacgcagtgctgtcagacgggggcgggctggagggcggtgcacacagacccttggacgactgcagacgagtcttcacaacttctagcgggcatgtcaccacggcaccggccgtgcctgccactcctccggccacgagatgtatcgctgtatccaactgagacatgttagcgccaccggtataattacaatattacatcgctgcaaactgcgaccgtctataaataaacaaaatgcaccaaatagtaacgtccacgcactacgccgcaacaataaactgtttacttctattttatgaagatatttcaactaaaattggtagtttcgagaaaaacaatcacataatcatagttttcaggaaaaatatcacttcattcgttgtaaatttatgaaaaaaactttgccaagttcatgaaaacacgttcgtcgcg

SEQ ID NO: 1149 - DNA, 3832 bp, Plutella xylostella
tttatttatatataacatacacaatacaaacaaaaaacaataaaacaggtaggtatacaatataatgtacaaattattactaaattgttattatcgactagatctcaattacattaaataataggaaatgtttgcctaattattaaaaactcaattaaatataattctatttgtatgtattatgtcatgtctggtaacctacattattatttttaagtacttactcccgtgtatcgagactttgaacatcaaaatattagaatgccttgttggttccgtttatgtataaacacaaaaattgtgtcacatcttccaaaaaatatgccagtaattaaattatattgtataaaagttggaagttacaataaattacgattacttatattcaaaccacatcacaataataggtacttaacactagttaatttgtgcatgattataaagttcaagattaatgacatgaaatacagtagaaaaacaatgaatttggcgatttaaaatagcacagatcattaaacgaggcacccggtctgagaatcagcagttatgtttgcaagaaacacctgtagcaactaatattcgccagacactcaagtcagggtcccataagagaacttatggtaaaaacgtgtcaaataaaaactatggtatttcaatgggcacttgtggcacaatctgcaaataatataaattatagattatctctctttaccagaccccattgtctgagttgtaaatataatgtaatactcaatagtctaataaaattattattataccatggtaatactcgtacataataggttaaccattgtaaatacgtacctactgctgttaatttcagtcaattatgcgttctaaacacgaacactcaattaagtacttaaattatgaatacatttgaatatgttacgtctagacctcatgtttctagaagcttccaaggcttattacttactgaaaaaatattttggttcacgctgatcttttgagaacagtatcgtaaatatcgcctttcaattttgttaatacactcttctagtgtggcaggtaacaaaggcacagcctcggggagtaaataatttactttacaggtgcctaggtaccctattcaatgctacgcatgtcaaagtcagtttagtcagtgttcttagtgcattgctgcccaggaatatggtttctcctcgcaacacaacgcttgagcgtcaatgtactacgaattcactgtatctttgaaaactttgagttacaataacatattatagagtaccccgtactgtagtatggcaattatcaatatactcagctctgctcaatatgcgtcaagtaaacatttgtttgcgtcacattcgttcctacgttttcacctttctggagggtttgtggtgtccgtttttcttccagttggactgagcgtcgccgttgagcaggcggttgaacgacgtcgtcttgctcttcgactcgaacagtacgtccgaatccgtctccgattcggacaggtccttgcttgtaaaaggcttgtcctcgtggtcagccaatggcagcaggcggtaggcgggggcggggcgcggcgcgcgggggggcggctcctgtgctcgcggctcgaagaatgaatactgaagcgccatctctagacggacgtacttcttctgcagctcttgtagcaccgcgatctgccggttgaggtcctccttggagcagtcgttctccagcgaggagatgaccagcatcttctgcgcggcgatgcgctggcacagccgctgcatggcgcgcagagcctcggcttctgtcacttggcggcggggcttgccatcgcctagccttctcctgtacttggctcgctgatggcgctcgtcgggcgagcggtcgagcgaactcgaggattggccatccgccacgcgcgactggaatgtgctacactcatcattactggacccatcttcatcgcagcgcccatcaatcaggaactccggccgcgaactggccaatgactgctcagagtctgcagtttgcctggagctgctaaccaatgagtgctcagagtctacagtttgcctagaactgctgaccaatgaggacgcagcatccgtggtgggccacgaactgaccaatgacggggctgcatcggcggtgggcgtggtcgtgtcagcggtgggcgtggccgaggtgggtgacgctgtgtggtaagactccggcgagccgagtgggtcaagcggcagagttaggctgtttttccgactcctaaactcctcccgttcatcagcagacagcgggtccagtacatcatcatcatcgcgcgagggccgcagcaccagctctgatttgctgcgcttcaccccttctagaggggagggttcgggtgaggcggcgtcgtcgctggccagggctcgccgtagcccctcctcctgcgccgccagtaaggccagctccgcctgtagtcgctccaccttggctcggtgcgatgctacggacgcggtgcggatgtccagctcgctctccaactcggatatctcttgtttatgtctctccacagtatctttgatactagtggcggtgtcagggtcgcactgctccaggattcgcatcagggactcggacgacacatccgaaatgggactgtctggactcggcgttaagctcgcccgcgcgtgccgctcgctggtagcctggtgccgtctctgtctgtcgcgcagctgcctcgctcgcacccgcagcgcgcggcgccgggcgctccagccccgctctagggtgctccagtcgccggagaggcgtcggcaggccagggagtattcgcgctccattgctgaacgctcctcatgaagcttcttctgcgcctgcaacagctgtttcctctccgcctgccagctctcctggcgggtcctctgctgctgtaagaactgctggcgctccagctcgagctgctggcgttgagctgatagttgggagtcggagtcggggtcagggggctgggtgaggtcggtggtggaccaggacagcagcgacaggcgcgacaggttcagcacggcgccctcctgtcgcagtttagccgcttcagccgggtcgttgtagcggaacatgttggtgcgcccgaggaggaggatgcagccctgactgagcctcgtgggctggtccagcagcacggtgttgagccagcacacgccgcgcggcagcagcgtggcggcccccccccggagcgtgatgcggcagtgtgagggcagcacgtccgcgcccgacaccaggatgtctgatgaggggtcgctgccgattagggtctcgccttccttgagatggtagagcgtgacgccggtggacagcaggttgtcgtcgatgcccacgaggtgcggcatgtccgagtccagcaccacgccgaggccgctcttgcggagccctagggctttttgttcctgtagaatctgctgcgtctcccgccacttctccgtccacttctccgtgagcaccttctcctgcgcctccttgcgctgcagcgtggccagcacgcttgattctgtgtctatggggtcagtagtgagcgtaatctgcttgcgtagcttctcgatctcctcccgtagttccctgatgagcttgacgttggggtcctcgttgatggtgggcttgttgatgatgttcttggctcggttcgcgtagcgcagtgtggagagggtctctccgtagttgcagtcggctggggatatggcagcgatcatgatggtcttggagttgccgccgagcgagtccttgagcagccacgttagcaccgagtcgcggtacgggatgaacaccttcttgctgcccttgggggtgcggccgtcgggcgcctgctggctgcagtctg

SEQ ID NO: 1150 - DNA, 1813 bp, Plutella xylostella
tccatttaaacattaaaaattgaatgagattctaacatttacctaactattacaatattctttcgctacattcaaaagtccttaatttcttatatgtttttattatgtatttaagtagataaaagtagcaaaggtttcttttacgaaaaacggccgaaaaaaactgtaaaataccccaaagtctaagaaaaaccattacaaaaacggaataggccagttacactcacaaaatctcatctcggtaaaaacaaaaaaaaaactctggcacgaaacgaaactgtcctcaacacccccccataaaaatccgggttttatgctgtttaaacggcagtatcgggatttttctccgggtgtttcgcattgccgttgctgatgtagtccccgtggtcgtgggaggggttctccgaccccttggtgtcgtcgtgcgggggcaggggggcctctgagtcggcgccgtcgggaatgtccgtgcgatgcgaccgcccgccaaaacaccatctgtcagtagccttcgcgaagacaatgaggaacacggccacgaggagcacgagcacggcgatcacgatgcccacgatggcaccagtaccaagttcaacaccagcaggctcgtccatggtgctcagtcggacggcgaactcttcagcccccaggtcgttggtgaccttcaggtagtacgtcctctccacgtcctccttcgcgatgtgggcgagcagcagggtgcagttgtagtagccgttacccagcgcctcaggctccaaagcggtgatagtaccatcctcgctaaccctcagaggggtgagtctctggtctccaacagtccactcgacgtacggcggcgggttggcgcggatggtcacgttgaggcgcccctcagcgcccagcttgaggccgaagatcgtgattgggccgggttcggtgcgctttggggggtagataacctgcagctgtctctgcgcgaacctcggctggtccatggcctcgtgctcggccttgcagaccaggcgccggttgccgtcgtccgccaacagatggcgcgtgatgttctggctgatcgtcttgaggtccgagcccggttccgacgttatgattggctggtgcaggccgtcgactacttggatgtcgtccaacatccaggtgatcttagcagcaggtcggcctccagcaaccacacactgcgcctgcagcacgtcgccctccttgaacacgggctgcggcggcgccagcagcagcgggggggacggcgcgcgtgcgacaactagcgccatcttgccgacgatctcgatactgccggtgctgggcggcagcacgcactccaccagcccgttccactcctccctgacgttgcggatgtgcgcgccgcactcgccttgctcaagtccttgtcccgagtagaccacatctccctcctgcacgctcggcagcagccggtacgacaccttgcccaccgtcatacgacacgagtcaatcgggtaggccaccttgcagagcacggtgacctcgtcccccaccctccgcaccgcctcgcggggggtgatgtccacgttttgacctgatacaaaagcagccaggagcaatccgaaaagcgcgggaagcacggccatcttgagacaaattcgcgccactttcaaaaacggaacacttgattctgctcaaatccacgaaccacactcacagcattccaaaaccaaactctaaaactagagagagcgttcgaaaacgaccactaaaaaaaataaacttgtatccttcttcaaccggttctgaactggactagaggctgtcccgctcactcctgcgcggtatatcttccctc

SEQ ID NO: 1151 - DNA, 6440 bp, Plutella xylostella
cctgacagcatcgcacaaaacggacgcatcgcattcagtaattctttctatacaaactcacacaagtgcgtccacttcatcggcattgccgacgtcgtttcttcacacatttatgaccatcggtttagtgcgatacgtacgacaccgataggtgctcataacgcttacctaaactaaatattattatttgttggtacactgatatctataatgagagacaatggaggcgatttccaacgctccaactctaaatttaaaacttttttttatttattacctattcgaattcataattttttgcgtaatcttccacatgaaatattttaaacaaatataacgtaagtctcacaagaagtagtgtaagtcacgacctcctatttctccattctaaggcggcatgttcatttgtaggttcaagtaggcagaggtggagttgaggagcccaatcctttgcttctgcttccgttgctcggtcatctgtccgcgcagctcggtcagcagtcccgtcagcgcgtggaccgcggcctgggcccgctcgagctgcccgtgcagcgcgcgcagctccagctccgccccgtccccctccgccccccgcgccagggatagggcgcgcaggcgcgggaaccattctaggttggaggtcttgatacaagtgtgcacatagctctcaggtccagtaaactctgtcgggtccttcactctcaccagcaccatgaagtagagatagtgccacatgttgtgttcactcgcgatgtgctcctcgaatgatacggtcttgttgtcgaatgctgagcggttcaggccacaaatgaagcaagtattcttcaaaatcagctccttctgctgcttctcgctcctgaggtcggcgaacgtgtcgatgatgacaccgaagatgaggttcagcacgatgatgatcaccacgaagaagaagagaaggtcgtagactactcgcgccacgtatagaggttcaaagctagccggagctctcagcacgtcgcctataccgcctccattcctcagcccctggttgagggtggtcacgatgcacatgatgagggagtcacaggaccgctccttcagctcgcccccgactgagacgaagcgggggccgcgcttgcaggtggaagatgtggagccgtcgtttaagtattttgaagctggatcatcgatacagttgtctatgttgaacgattcatcatcatccaactgatccacttgcagcaaaaagtggtccctgaagaacatgtagccgacgatactgaacatgtagaccagcacgagcgccagcaccgccgtgagcaggatcgagcggccgttgcgcgtcactgagcgcatcacgttcagcagcgtctcttcacggtacactatgtctagtagcagcacagagaagaagaaggggtggctcgcgatggccatcagacagaagagtaagtaggcgcagtggtaaagcagctcgcggtctcctaatacggcccggggtgacttccacagggtgccctggttgcccattatgctgactaggtggatgcctttcactattatagtgagcatccccagggtccacagcgcaggctcgggccccgcgcagtagatcagccgcaccaccaagctggctaacagggtgcgtactccggacgccctcggcagcagggtcaccagcgcgccgccggccaggaacaccagccacacgactagggatgcgtgctggcctagtttcggcgtctcctcttgaaacggatagaagaaggccacgatgacgttgatgagcacggcgaagttgaacaggatgttgctccacagagacatgtaggacgacacccagaagaggagcggctgacctctgagtttcttctgccacttcatctcatgatgcagatgctccagtctgctaaagaagtctgccaccttgctgccctggtcatctctctcggccgtggctagaacccggtgtttgctctccgtggggaggtactcgcatatctccgggatcgggaagacgatttgttccatgctgcggtcggttcggactatctcgatctgcgcggtgtgtgtgcggtagtattgcagcgcatgcgcgtggggcccggccggcgcggcgcggacgaggcgggacaactccttgttgtgggccgctagctggtggcacaggatgtagatgttgtggcccacttctttaggcgacaccccctgcacgggtgaatcatcatcagagtcggagtcggcgtccatcgagttctcttgatggaacgcagagcacgccacgtccaccagttgtttagggtccatattgtacaatattctctctgcattattctcggagtcgttgcgagactccataatggcgaggagcagtttcgacgcgttgttctttagctccagcactaggtccatcctagtcttcccgagtgggttgatgtcgttgagtatgagcgcggtgatgatgtcgagcccgttgctctcgtgcgtcgcgatgcagttctggttctcgtggcatgggccctggcagtactcggtgagcgtctccagcgtctggtcgatgagcgccacgttgccctcgttgatgtagagccccagcagccccagcccgcccgtggtggagccgcagatgcagtccaggaacacgaggctctcggagaccaggttgtagttggacttgttgttttggttgcggaggaggttttgcaagtccggattatggttttcacacagcagttgaaggaatctcaatatcggcttcatgacggcaaccttcgctggcaacacgtcagagttgcctggagcacatttcttttcggccataatctcctccaaaactgatgttccgtgcgtcatggtgtgtatgtcggagtaggcgtgcagggcggagccgcacgcgccggccacctcctcgtccatctcttcaccgaccactagcgggcctggggacagcttgccatcaacactaatatgcttggtcttctcagctaaactagctcgctgcttgtcgggcgcggcggcggccgtactgttggtggccgaggacttgatctcctgttgggcctcacgcatcttgtcgtagaataccttgaaaaatgcttgagatatttcgccattttgcagcttcttgaagatgctgtgttggatcgtcgggtttccaccttccagcaacgcaatgcccagctgtatagcctcgaggaagatggcgggtcggttggtgctcttgatgaccaggtccaccaccaggtccgaggccccctccttgtccagtcgcgtctgaacttgagataacgtctggccagtgcgcaggagcacgcgcgctccaggcccatgagtgacggcggagggcgcggacggcggctgtatcttgggctccgacttgcggctcacgaagtactgcgagagcagcttgttgcgtagttggttgcccttctccccgtactcggggtcgacggccatcatctcccggagcgtgcgcagaaccttcacgcacagcttctcctccttctcttctagaagcttctccgtgtgctggatcagtctagatataaacacattagtggtatggttctctccctgcgcgtggaacagtagatgcggcttgtacaagatgtccaccaggagggacaactcggcctgcagtagcgggcgcagttgttcctctagtaacgccactatttcctggagaccctccatgactgaacggtcgttgtggaggttcgactgtgaagccattttctccagcttggaagtcttggaggctagcagccacttgctggtctgtcgcgacagcgtggccgccttctcgaaaacaccctgtatcttcgcttccagctccagggggatcgctatgccgcgggtcttagcgacttcgctgagcgtgcgtatgcatttctctacgttgagtttctgcgcgggcgacagccacgggcactggtagatctggaacgtggtctgcagcaggctcacgaagatcgactgacgggtctgcacagtggtgctctggtcgctgaagggagagttgaagaacgtgcatatagtgtgcaccagcacgtccgtcacgtagttgagccacgcctgctgctccgcgtccagcgctgatgatgaagatgaagaggatcctgacggcgcaaccttcgtgacacccgccatgtcttgcaagaacgatcgctcgaacagctgccacatgtagttggacgagtagatgtccttcatctccacctcggtgtcgatgtagcagtggttgaggaagcccacgtaggcttctttcacctcaggtatacagtcagggttggtgacagtgttgacgatgtcatctagcggcagtaagctgtgacacttgatttcagtgtagacgttcttgcccatcgtgcagcatgttagaagcttcactagctcgatgtggtatctgagagcttcaggcatctgcttggagcggcggtactggcgcatcatctcgcggaagttgttgaacgacaccttgtcgttgtagaacaccagcacgtcttcaccggcgttcaccatctcttgcataacaagatcctgactcctcctgatgtagtggttgtctgccctcacgactgtgtgaaggaattgtagataggcgggccggcgcccccgggactcgatgcagtgcacgaagtgagccaccaccttgtcgttgttctcgtgagcgcacaacacggcgttgtctttgaatatggcgcagactgtctcagcgtcgcggaccccgatgttgaggaacaggtccaggtgtcggtgtagtagcgcctggttctgctggttgcgcagacagaagtgctgaaggaacgagtgagcgagagagaggagctcgtccattagcatgtcgtcttcgtcgtgcgggacctgcaacaggtctaagaccacattgtgcaccccgatattgcgcaacaaccgctgctcgtggcgccgcggcttgcgggggtcgcccgcgccgctgttgccgtgcgtgcagtagcggatcatacgctccaggatctccttaatcttccgatactcgttgatgtgttcgctcttgctcgctcgtcccgggtcgagcacgttgtcgagcgacgcgttacgttctagcgtcgcgccgcccgcgcccggcgcgcccgtacgcacatcgctctcatcggctatccccgcacgtcccttgttgaagacccacagctcggacttctccacgctctggcgcagcaggtccaggtccgccttgatctgcttgtacgactccacgtccgcgtccgacaccagcagttgcacctgtttaaacgcttgcaacacctcctggcgttggctgaagtgtcggaacagtagggtcagagcccccgacactagggctgccgacgcgccctgcgagcgagcgaactggagcagcacacgtagcaccatgcgaccgccgcacgagtctaggtctagaccgtcccgacaactgaagatgccctcagcctgcagccctatcgcctccacgtcagcgcggccgatgttgtccgccccggggtctccttgcgagaactgcttcttgaagatggagaggaggcagctgatgcggtagtctaaccggacgtccaggatgaactgcagtatctcaatgatcttcagcttggtgtccatgactagcgggtgttcacgagccagcatcagagctgaagtgctgtgctgcatcgccgctgcggtggcgccgcttgccgccgcggaggccgtatttctgacggagcccacggagcccagcgtgatggaggtcatcacggctcccatgtcgccaatactcctcagcactccgccttcaggtttctttgcctccgtttcagtggcagattcgacctcccccgcgagtccgctgttatcattgatggtgtcgatggcagacacacagtccaggatgctcagcagcgtcttcgtgagacggagcaggtcgctgaagctataaaacccgaagtaaatcagctctctcgccagcttcaccacttcgaacgtgagcttgttctggtcgtggtcgctgaagtaccaggttcgagtcacgacgttgcacaggtagtcctctacgaagcggatggtggacgcgaattgttgtttcaccttttcacgggtcggatgcgggccgcctttcacacattggtagtcgtgtatgtgtatgacgggcggcacctcggtccacagacgcgcgtacttgaccggcgtgacgggctcctgcgggtcgcggtccacgtgaaggtgcagcatgagccggcagaatgacgctcggagggagtgggagagggtcgagttggacatgcatttaagaatcaagttaacatgcagatgtgccgacagattattcagtgccaagtactgtcggttgagacacatgttgctgaacaagtcgagctggtgtcggtagtagtcgaggatcttagcggactcgcagttggggtccgtgcgagcttctgcggctagctcggagaggagacgggaacgctctt

SEQ ID NO: 1152 - DNA, 3044 bp, Plutella xylostella
ggctatctgtcttagtggtccggtggactagaaggggcgtcccacagtaagattcgtgatttctactcgacatgttaaccaagagtgttgacaaattaaaatatctccaaacccttgttggtaaaattaattcacataagaagaaaaacatacgaaaatgctgaaccctacgccttttagttttacataatgtacctctaatttagataaaataaataattatacataagcatactctgctatagctgcttttaaataattatgcaccaaagtaggtataaatgatttttttgagacataaagatttcacactttagaggtaatgcaattgggactaacatattttttatattttttttttcaggagtcaaaaatgaataaaagatcttttgaattcctatctctgtgtatttcttaatttaaacacaagtaggtacatttaaacttcattttgtactcaaatccagaaacggcattttaaaataaattcctagatattttctttacaaaatagcacatctagatctaacaaactattcgtagtataaacataacctatttataataataatatacataaataaaaacttacaagaaacactatacaaagtaaacttttaaaatcgaatctacgatttatttttattgcaatatcaatgcggggcatcgatttttatattaaatctatgggttatacatactcagtcacagattagtaaaaaagcgtgcctttatattgccacaaggatcattttccaaaagaaagagggcgctagtatctatagaagtgatttaaacgctaaaagcaagaaaatctgcattgtgtattctttaattttgtgaaaacgtcttctgattgtatctatacaatgcgtgccaaataattatccaaaacacactataattgacctaattatctggcactgcactgtaacagtttccaatgatccttgccacgacatagcctttcacatagacggcataaaattacaattactggcaaaaaaaacagagacaccattcaaacaatttgttctaaatcaaaactacgaattaaaaatggaattttgctttaatatcacattttttattgttttttttttacttcttcaatttcgagatgataattttgcgagagcagtcatacaatcaacaagatacctataaatttattctgttagatagaactattcatacgtaactaatatttataatagactcaacgtaaaaactgttatgaggcggcccagaaatgatttaaatttaacaacatcgaaagtcaaaccacaaccattgcttaaaaaagtacactaaattacactccactttatttaaaactagacataaagtgtgatcttaaataaaatggcgtgtaaaattgccaaaggccaaagctatctttccaagcattctagaattactggaaattgtatccaagcaattaaaaccattgctatatgaatagcttataacctcattgccacatagtgaaagtaaatatttttagttccgcacaacgccgcaagatggccgttggcgccactatcgacaaaaatgaatgatagaacgaaacaaaaacaaaacgacacgttgaacggacaaatgtcaaaggcattgagccttgacacgacgaaaataacagtcatattcgcatatcacacgtaaataagtttgtacaggtttttatttatatccgtggtgttgccatctcgaatagaaatagttgggtggatgtcactggtcgtagcttttgggtttcctgtccatttcatcgtcggaagtgcggttcatcagctgatctgtgtggtgcggcatcttgggcacgagcacaacgttcccgtcggcggcctgttgcagcgagtactggctggaggatagggggcgccccgccgagtcacggaggttctggaacacgtgtcggtaaagctgcgcaaacgtctctttcaccctctgtctctccgctatcaggtgctggtgatctctttgcgtgtgtatcttcctgtccctgactgtgcgtacttcgtccgctagcgaggtgatctggtcgagcttgcgcttgcggcagttttgtgctgccaccttattcttcccccgtctcctaatatccctgatcagagacaactgcgcctcgctgaggtcgtgcttcgagagccgctcgttgaactcgtccatcggcaggttgatgatgtcttggacttctaggggtatgcctagcgccttggcccgcttctcgtctctcgacatgtgctggctcgtggtggagccgccgtccgatatgctgccgtctgtcatgcgacgcactcgcttgtcgctcacggcgggcggcagctcgtgcgcgctgtacgtgtggttgtgtctcacgcgctcgggggtcccgtatacgaatctgtgcggggtcgggcttggcatgttggactgcagtagtgagtgcgaggagtgcgccgagttgaggtcgagcggcggctgcagcggcgtcatgtgcgggtgggaggacgccggctggagacgcggcgtgaactcgttatgtaaatgcatgctactatcgttgtgtgcgtacgcctgttcgttgcactcgtacttgatgacgctgtgcgctcgcggcgccggcgtcagaggttccaggttcggggtctgttgttggtcctggaagcatcgtttcccgaacatgtggtgcttcttctgcgggtgcgagccggcggcgcggtctcgcccgtacgccccgtcgtacggacggaacttggagctgtggtagtcgacggcggagtcgctgcccgcgtcgcaccactcgccgtccgacagagagggaacccgctctgagcccatggacgagacggcgctatcggacgccgagtcacgctctgcgctggtcatcatcatatgcgtgtgattatgcgggggagcatgatggtgcgacgccgcccctccgtccaacactcgcatcgtatacatccctgcaacaaacagaagagggttagtaaataaaagaagtgctgggttccggttgctgtttcggcagcagtcgtttagcctagtcagaggccttc

SEQ ID NO: 1153 - DNA, 1077 bp, Plutella xylostella
tatgaaatgacgtttgacaatgatgtctcgttagttgcacattttgaccaccggaacagataagattgtggcactatactaatgttacgcattttggcatcttctttggtaaataatctcttgttttaaggcacttcattagataatagcttaacttatataatacagttagaacaatacgtaggtaggtaatcgtggtgtacctatcaactttataatatatctatataacgagtatagccttgtattgtataggttctatacaataaaggttaaggcactttgcatttctctcataaatacttttatcagtaacttgatgctattgctagtttgacacaatatgtaatgctaataacttaacggtaacaattctaacagattaaggtagttgttgatgtcctcatcggctagttccacgcggcggtggcggccggctgcagctcgctgctacggctgaaatgtaaaattatgctgttttatagcatttacttcatatacataaacaaattacggattcatgcagtaaaaaaataaaaacaagcgaaatgtatgggcacggactgaggtaacgggccgctagagggcgcctgtaacttagtttaattaactgtagtaaaaaaaaaagtggtacgtgagagtactcagaaatttggacgctttgcctacgtggtggttagtgggggcggagtcagttagtcagtgtgcggcacgtacgtcactcggccaccacgtccacgcgctcgggcaggtccttgtgcaggtggcgctcgtgcagcagcaggttgtgcttctggtaggcgcggtacacgcagtaggggcactggaagctgggctgcttgcggcactcgtacttgacgtgccgctgcagcgagcccttgtgcttgtacttgttgccgcagtcggcgcactcgtgcagcgaccagcccttgccgtcccccgcgccccgcaaccccccgccgtaacccaatatataaggaccgtacagtgcaacttgcgaatctcgtacgccgtcactcgaattcattatttcgtcctgagatctttccatgtgccactgaaaattgcgtacgacgt

SEQ ID NO: 1154 - DNA, 2504 bp, Plutella xylostella
cgcgtctcgcgtctatataaaccatctgacagctccgcgcggcatcattttgagaatacaaaaagcgaagtcaagttgtggttcgaagcgactacaaaacacgtgctattttaactgaattcgcgctagtcaaacggttttctgtgaagaagtttacgtttcctgaataagtttattgttaatttgaagaaagaaaagtgtcacaatgcctgaagaaatgcaagcgcagtcgggagaggtggagaccttcgccttccaggcggagatcgcccagctcatgtccctcatcatcaacacattctactcgaacaaagagatcttcctccgtgagttgatctccaactcgtcggacgcgctggacaagatccgctacgagtctctcaccgacccctccaagctcgacagcggtaaggaactctacatcaagatcatcccgaacaaagccgagggcacgctcacgatcatcgacaccgctatcggcatgaccaaggccgacctggtcaacaacctgggtaccatcgccaagtctggcaccaaggccttcatggaggcgctacaggccggcgcggacatcagcatgatcgggcagttcggagtgggtttctactcgtgctacctcgtggcggaccgcgtgaccgtgacctccaagcacaacgacgacgagcagtacatgtgggagtcggccgccgggggctccttcaccatccgctccgacgccagcgagccgctcggccgcggcaccaagatcgtgctgcacatcaaggaggacctgaccgagtacctcgaggagcacaagatcaaggagatcgtgaagaagcactcgcagttcatcggctaccccatcaagctgatggtggagaaggagcgcgagaaggagctgtcggacgacgaggcggaagaagaaaagaaggaggagggcgaggacgacaagcccaagatcgaggacgtcggcgaggacgaggacgaggacgccaaggacaagaagaagaagaagaagacgatcaaggagaagtacacggaggacgaggagctgaacaagaccaagcccatctggacgcgcaacgctgacgacattacccaagaggagtacggtgacttctacaagtcgctgaccaacgactgggaggaccacctggccgtcaagcacttctccgtggaggggcagctggagttccgcgcgctgctgttcgtgccgcgccgcgcgcccttcgacctcttcgagaacaagaagcgcaagaacaacatcaagctgtacgtgcgccgcgtcttcatcatggacaactgcgaggacctcatccccgagtacctcaacttcatcaagggagtggttgacagcgaggacctgcccctcaacatctcgcgagagatgctgcagcagaacaagatcctgaaggtgatccgcaagaacttggtcaagaagtgtctcgagctgttcgaggagctggccgaggacaaggagaactacaagaagtactatgagcagttcagcaagaacctgaagctcggtatccacgaggactcgcagaacaggaacaagctggctgacctgctgcgcttccacacatctgcctccggagacgaggcctgctccttcaaggagtacgtgtcccgcatgaaggagaaccagaaacacatctactacatcaccggagagaacagagaccaggtgtccaactcctcgttcgttgagagggtcaagaagcgtggctacgaggtagtctacatgactgagcccatcgatgagtacgtagtacaacagatgagggagtacgacggcaagaccctggtgtccgtcaccaaggagggcttggagctgcccgaggacgaggaggagaagaagaagcgcgaggaggacaaggtcaagttcgagaacctctgcaaggtcatgaagaacatcctcgacaacaaggttgagaaggtcgtggtcagcaacaggctggtggagtctccgtgctgcatcgttactgcccagtacggttggtccgccaacatggagcgcatcatgaaggcgcaggcgctccgagacacctccaccatgggctacatggccgccaagaagcacctcgagatcaaccctgaccactcgattgtcgagactctgcggcagaaggctgaggttgacaagaacgacaaggctgtcaaggacctcgtcatccttctgtacgagactgccctgctgtcttctggcttcaccctagacgagccccaagtgcacgcctctcgcatctaccgcatgatcaagcttggtcttggcatcgacgaggacgagcccatccaggttgaggagtcgagcgccggcgacgtgcccccgctagagggcgacgctgacgacgcgtcacgtatggaggaagtggattaaaatctcagcttttagccatgttgtaatggtgtttatgtgattgtatcgcgaagttattttgtgcactggtgtacagccaaagactgatttagttcaaagaattccataaaaataaatgaacatgttaacaaattaaaaaaaaaaa

SEQ ID NO: 1155 - DNA, 5429 bp, Plutella xylostella
gctggaagcaccagctccaagtcgtcattggccgtcagtcgtgcgcgaactctcacactagacacacgtaaactacgttaaattttatctccgtgccgaccttgacgctatttcgacgccacacgccggttcaacgcttgatcaatagcggtggtgatgatgaacgggcgcgccgaccccggctgggaccagcagttcctggcgccaccgctgaagatcagcgaccccgtgagggcgcagaagatagcagtccggctccagggcctgcaggtgaatggtgcagttcttcggaagaccgctgcggtgttcgcggccgagctggaggcagggctgcaggagaggccctcgagtctacagatggagaacacttatgtgccggagttgcctgatggcactgagcaaggagtgttcctggcgctggacctgggcggcaccaacttccgcgtgctgctgctggagctggaggcgggccggctggtgcgggaggacgtcaagcagtaccacatcagtgacgagctccggctgggccccggggtggacctcttcaacttcctcgccgactgcgtgcaggacttcgtcatcactgagggactggagaaagaggaaatgccattaggcttcaccttctccttccccatgaagctccacaacatctcctccggagagctgataacctggactaagagcttcaactgcgcgggcatggcgggagtggacgtggcggcgctgctgcagacccgcctgcgggagagagggctgaaggtcacggtgcaggtgctgctgaatgataccacggggacgctggttgcgggggcgcaactgaatcctgatgtagggatcggcgtaatcctgggcacgggctccaacggctgctacatggagaaagcgagccgcgtgacgcactgggagacagaacacgagcgggtcagcgacgtggtggtggacgtggagtggggcgcgttcggggacaacggctgtctcgactacctgaggacggagtatgatgatgaggtggacgcgcggtcgctgctggctactagttttacattcgagaagtacatcggtgggaagtacctgggtgacctgctgtcttctgctctccgtcgtctagcgagagacgagctattccctgccgccccggaacgcctgcatcttcttacagcccaccttagcctttttgaagaagagaacgaagccggcggcacggcgcggacgctggcggtgctgcaagaggtgtgcggggcggagggcgcgggcgcgcggtggagccgcgacgacgcacttatcgcgcaacacgttgctagactgatctcaaaccgcgctgcgcaacttgttgctgtttgcatatccaccctgatccagcggatggaccgcgagcacgtggcggtggcggtggacggctcggtctacaagcggcatccgcgactcaaggggctgctgcagaagtacatacaactactcgctccagaccattcgttttccctaatgagtgcagaagacggcagcggcaaaggatcagccctgacggctgctattgctgctcgcattgcccaccggagctaatagctgcaagacgcagatgcaatagagtaagagtaagagttagaattgaaactagccgggctaaaggaagaaaataatgaggcgaaacaatcgaacggtaaggtaatgtgcttgtttaattcaactggacgttaagttcaattgtttagctgaatcacatattttatgggtacattatcttatttcttagtaggtagtagttaggttgtgaaaaaaatatttttgttttaagtacgatgatttggtggtacaaaatggatttggcatgtattcgtctaatcacttgtaggagtactttaataaattttcttaataaataaacctcgtattcatagaagaggcttgcaaatcgccgatatttttgacttttttggactctttgactgacaagactctcaaacaactattagttaaaccttttgtaagttctatggatacggggaaagtatattgatatactgatgtagccttgagagcagctgtatggaatagtatagtaagtacataatatgtagtaaagttattaatatattattttgcgtcgcaaagcacatattttatatgggtactgtaactatgtacatgaggcatttaaaaatgatgatgatttatgatacagggacaatgagatgtattttttgtaaatgggagttatctggatatctagaaatacttctttgagtattgcgtacgcctgaatattttattttatattgtttataaaaattgggacagaaatatgaaatacacaaataacacataactattaaacattatatttacaacaaaatactctagattatagttaggtatctagttaaataatatgaaacatatcgtgccatactcattatatttatattatttacttgtaaataagtatattttttgtagctgagtacaaaagggtacctactttaagtttaagtacgaattaaactatttttataaatcaaggtaatattccattaaatttccttgatattttaagtatctagataataatgagtaagtcgggaatagtgcaatgcactcttttgttgttgttatagtaagtaggtttgtcttttagttttttgttaaccatattttttacattttgttaaacatattatatgttcaatggtcacgatcatgaataaatctatcttattttacaatatttttaagagtttgatacaaatatactgttatgttttactgttacaggtgttttaattgttatttatacaatacatgtaatatatttacagtggcaacttcatttaataacactggttgtcccgaaaaggattttaaatggaatgttttggcagataggagctcaattctggtaacttcgaagaccctagagattacctccggaatcaccagaagtgggtccttgtactcaattaacttttagtataaaacctacataattaacataaatatgtcagcaagtcgactccacatcactgggtgcatatcgtctgtcacgtgattgtaccgccatctttgttacttcactttttgctctcgagttaatgataccgcgtattatgtttacgaaacctcgactttctctcttactttcctcaagatactctgcagttccgatgctgatgttgtcttgtacccgctcacgttcctctggaccaggacctggctgtacagacgcttgccttcttcaactccaaccagcagctccagttgggctcgactcagtgcgaatagctcgtggccggccattcgtagcttgcgttgcgtcgctgcactgaagcctttcgcttcaagccacgctgtgatttcatctggacttgatgttttttgtatgaatatgtccggagttttcttaatgtctagcttgttcttcctttgttgataaagtgtgagtacagctttcaactcctcttgcatatccccctcgcccatacttatcatcgaccgtgtggatttaattgtatcggtgttccttggagccggttcaggcgtcggaggcagagggggcggcggcggtggcgggggtggtaccacagtttccgcaccgccgctcgctgtcggcgaactgccgccagaaccacgaccgccggtatcctgatagtgcgtgtagatggggttggggtacagactgggctcgtccggagccacgatggtgtggggcacgtgcgccgtgaccccgcggcggttgcgcgccttccaccacttgcgcgagtcgtccagcacctcaaggtattcccctctgacgacagtaagctccttgtcgttgtttgcagtccgcgggtatgtgacgcgcaccacgcggccgccgcgcgccgccacgcctcgggcccacgcttctcctaggtcatcatcatcccgatcggagcggtaggtgggctctctttctggagacgacgctatggaccctgagtcacctcgcccaaggggtcttgtatttctgcgtaggggttggtcatctacttggtagtctggggaccagccatccatgaatactggctggtacggtggaatcgaagtcttccattgctctctgggtattaaccacgcgtcaccaagactgtgccaaagttcagtttctttgctcgtcacgcagttcgctagtagattgagggcatctctggtcagcaaaggctgtaccactcttggaggcaacgggcgctctgcagcatcttgagctgcatccacaatcagcgctaaaggcgtgaagagaaaatgcaccagctccggagcattagggtcatggatgtgcgcgcgcaatcgagcaagcaagttgaaggagagtttaaacttctggaggacatcgacaaagtcgcgttctgggggtggtctggttcggagggcgagcatgccgtctcctgtggcctgttgtcttcggccaccacctctggcgcggcgccttctttctaattcccttgaagcggcagccgcgtgctgcaaacgggcgatgaatttttctatatcatcgaagcaacggttcaagatggcgatgtcctgttcgtagagccgctcggagccggtgctggaggcgtcgtcgcgctcgccccccgccgacccgccccgctccccgcgctcgccccgctccgggcgctccccgcggagctgcgctgacatttgctgtctgcgaggtctctctatttcggtttctctctccctttctctttctctctctatgatgaagtccctggctccttctcccgaccccccgctgccgccgcccttgagcgcgttcagctcctcaaccagcgtatgcgcggcgacatcgtgacactggaagatgtggagttccctccttggcgccggagcgtcctcagcccctggcgagggggctggggggcctactacgaaggctaacacgttgttgtagagctccgctggctcgggagaagtgaaggcggtgggggagtgcacgtagccgccggggaaacgctccatgattgacccggtttcatagtccattactagcacccactgcccttccacgcataattgcatcttttgactccatattccattagtcttctccagctgcaacagtctcctcatgccatcagccgggtacacaatcccggtctccctcgtcaccgtgaaggtggccagatgctccacactatacgccccccgctcccctcccctgtccgccccccgcagccccgccagttcgtcgaactcatcgagcgcgcgttgcgtcgaacgcgacgtgtcggtgcgttcgttgcgttcggtgcgactggaacgcagcgccattttgttgagttcggcttatgcagacatgccggtgtagaaactgtgactcccgtgcgggtcccgtgtcccgagtgcggtcagtcgtcgtgtcactgtaactatcacacgccgcgtcaacagctcgcagctagccggcgcgg

SEQ ID NO: 1156 - DNA, 6211 bp, Plutella xylostella
ttatctcaaattcgttcactctaagatgtggaatgcaattagaattctttaacaatattaaaaggtataataatatattaaatttttataatcagctcaacaatgtatatattctatattaatttacaagcctagatccaaactgtgatatttattgcacaagcacaaatgtggcttaaaatttcaatgtgaatagagctcacaaccttatttttatttctgtcttcaaatcggtggatatcgcaaaacagtgggtgaagacagtgagaatactgaggggaatcgtcgaagctcaccgaccgagtaaaaattacgttgggtaacatctcaactataatataaatcgagtgaacaaacgcctatcgagctaatccgaccgacaccaatgtcttttaaaactttaaacagctaattttaaactttaatttgccacgttcctacacccgagttagcgatctgtgcttggtgccacaatttaggcaatacgcccacctccaatagggagggtaacattgtagagctcactttgtgcgctgtgaaccctaccgactgccggccggtccggcgcgggtggcgacgcagcccggccggactccctgcccccaccgcccccgcccgcgcgccactacgcacccgcgtagcatgccgctacacggcgatagtggaccgtcagcggacgaggtcgcgggcccgttccgacggcgttcagtgatccctacatctactgatgaatttattgctggatacataagggaatatagattcaagagaaatatatttaccaaaaaattgcttttaaagtgtatatataggtaactttttaagattcccgagaaaggctactgtaatgtactaatgatacaattattatcgagtaacgtcaatggacaaaagataccatttgacctgccatagtcgcctacccttgacagagtgcttagtctctacagcaatatacagccgacgtcgggcgaaaacccccgcgcccgcgccccgcgcacgcccctccctctaataaacgtctctaaacaacaccacgatataggcaaacttgtgatactgttactacgtgtatatcgaattgaaaaatactaattactacaaaaaatatctacactgacattctacataagatatatggcaagaacaaaaggaaacactgtcgacaagatatcaccaaaattaatgcaagaagattgctgcttcaattattattacaaataaataatactttcatcattaaacataaaacaaattaaattgaaattgtatgaaacattatacatttgctgatatttcaacttcaaatttattaatattggaattcacacataaaaatagtataatttgtaaaattatccaaaacttatcacaccactttttaataattttatgcaaccctaaagcaatattgatagcgttacacgctccctttggggctttaataacatctatttcggttactgctacttcactaacacacaataattttgatcaatgacaacaaattaagaattgaacattaatattaaaccctgaatattaataaacaaaaaaaattggcaacaattagtaactaatcaatctttacaaatatcatacaataaaataattactatgtgcatgcacaaatattgtaagaaaataatttggcagtaaaaattcgtaactctaaaggcctaaacactggccaaaatactagttttaatataggccagaacatattatacgttaaaacaaaaacagtaaaacgacaaaatgagagtattaaatcacaccggctcgtatgcgaggggtatgcagactcgtgtattcatcaataaacctagttaaaataaacaaaataaaattccctaatgctatcgggacaaaaatcctgaaacaaataacttaaaaacaatatgaaaaaataaaacccaaaagttactcactaatcgacagagaattcagactcagtgtatgtcggagcggcgatgccgtgccgtgtacgacacgacccgccccgcgccggtgactctatatgccttaaacaacgttgcgtccacatgtctctattattgcttctatcacatctaatgttgataaaatattcaaacttgggaaactgcttcaatacaataacaaaataaacattactaattaagtacataaatctcatacattctactcctgaacagctacagtaacaatatgggaattaatgatattatttactccattataataatataagagtgccgggcaaatattcattttggattcgtgtatcacaatacaacaagaaaatgaccttacttacatactggtaacagattttcactgtaatattatattgtcccataagttcagaaattttatacacttacaatagaataaatgggcttgggttttacaactacaaatcaaaatttatgcaatttctccttactcgcaaaaaatagagagcactgtataattaaacgtcaacatgaatataattattaacaatatcacacgctatggtcaggttgggattggttactacttccagttttaagtacacacctctcgccctagacattgtaacgttaaaataatggccatctacaactctcactattatttggaaaattattcacaaattaaagttaatactttgaacattatatttgcactgttaatccaccaatagagacgcagatattaattcctaaaagcctaatggttgaagaattggaagacttttaaatacataatatttgttgtatatttgtatccaatttcgcaagagccaatatgcgtttcaatgtgtatgtgaccattactcgctagttacaacgtgtagccgccccacaagcgttacacataccctggcgttcactcactacgtctacaacatgtgacgcgcttagctaaacactaattgaatccgtgaaaatctgttaactttgtataaatatgtatgtacgcataggtgtataacatgcacatcaataaaatttaccaccctttgcatctatcgtctaaaaagtaaaatctcaaattttgaatattcgtgtgggtaatgtaaaaaaatatcaatatatgtttgacaaacagtatacgaatataatataataacgataggattaaaaagtccttgcagtggcaaattcagattataataattataatatattttattacatttgggtaagaataagatagggatgttttgaacagttttatacactatagtaggaacaaattattacaagataggtagtttctgggagttatatctggaattggaatgacatctgcactaattttgtgacagctgttgtgactacttgctttacaagcacttaccatgactacccaaatgcatactatgtagaagttagcttattcattacttctccaagattaaactacatgaaattgccgtgcaaagagtttttaacattggtacatttacataatatattttgtagtactatatccaaaagtttaattgtacgaatttattgcaaggttaaaattacacagcgaatttaaattttaacatttgaatattaatgttggttcgttattcatgttatttttgaaccaaaaggcatatttaaatgtaatcacctacacaacgaaaaatcgttaatatgtaagaggctctcaaaacaagagtacatgaaaaacattttgtatagacacagaattctgtaaatggtaaatatatttcaacggacaatatataatattgtatacgagattaacctaaactagatggcacgtttattccagtgtcgcctcctttggtcaaaatttacatatttaacgtttcaaactcaattgtgcgtttaagtgttgactacgatgcgcctttagatattatgtgaataaatttaagtcgactaataaatgaggctcaaatacacaagtgtacgaggcgacacccataccagtcccctaattgacatgtaattacttcactcgaactaggaaccataacagctgttaaatttagacaacaaacataaaataatagatattcaattatataactaaactttggattttcagtttctataactaaatgcaaccacataaaatgagagatgaaaaacaaaccaaaaaatacgtaagtattcagtactttggaaataatgacttgaagatctacccaaatgcagtgaaacactaaatatgaaatgccatgaaattcagataagagtaatcacgaagcgttaatatctgagccatcatttcacagcatgtgggttagagcgtgtagtatttataatcataatcagactaaaacataacatcaagttttaacataaattaacgaatagtcaaatactggtttagcaaaaaatgttaagctttgtaaaacagcaattaaatataaaatatagggaataaatgtgagatcttgtagtatgcagacttacagccatcgggttactcctcagacaatgtaaagggtgttgaggaccagtacgtgatggttattcttggccagagtgactatgtagccctccgaggttatcttcagaccgcagcagcgggataccttaacataggggcactcaaactcggtgaccagaacgccgtcgcgtgagaacacggccacatggaacttgttgccgtgcgagtcaccaatcaggacgtctcccgcgtccgacacgtcgatgccattggggaagttggtcacgttctcgcagccaatccggcgcaagaagcggccctcgtcgttgaacacaaccacgcagtgccccttgaagtcgcagacgtagaattccttgccactaatagcgatgtcggagggctcgcgcatgcactcgctgcagtcgaaccagctcatgaggtcgccctcctcggacaggatgaacacggtgggcgtgacgctgtccacggccacgatcagcccttccgcggtcacggccaggccggccacgatgtcgatgaaacgcacagcaattttcttcaagaagtgtccgttcttggtaaatatctgcatgcgggaacgctcgttgccgcggtcgcacacgacaaacttgccggtggcgcgcaccacggccaccttgcgcgggtaccagagctgcccctcctccttgcccgccacgccgaagttgaacttgtggttgcccgacttgtcgaaaaccgttatgcggtgattgttggtatcagcgactatgatatcttcatcgttgccgagacagaatccgtgtggggaattgaactggcccttgccgccgccgagttgtccgaacttgaaccttatgtgcatgggtgtagctttcgtagcgcggactaggggcacgggaggcgccactaaggccgcttcttccgcggcagtcagcagaggcctgcccggggacaccccccggggacccacccctcccatcccgcctactccgcccactccaccatacccattcacctcagtgttcaatcctaatttggcaagcgcttgcaggttgttgaatgcttgcggcgagttgaggtccccggccagcagctcggcaagggtgaaggagggcgcgggcgacgcgtgcggcggcggaggcacctccttctccgcgatgctggccagctgctgcaggttgtactccaccatggagggcagcacgggcacgctgttcacggcgcccatgccgcctgatagagccacgctgcccatgcccgtcacgcggcgcacgttgccgagagggaacgggtcgtcgaacaccggtgctgaagatacagacacggccggggagtgcgagttgctcgccatcgacacaatcgccgacgactcgctcgcgcgcttcttctcctccgcgcgcgtcgcctcagtacggaagctgccgaatgtctcctctgtgatggcgtcgaacttgtccaccttcgtgacgaactccaccgagtagttgacgtcgaactcggagggcccctcgagcaggcgcgcgaactgcgacgcgacggtcttcttcagcatgacgatctcggtgccgtcgccgcggcgcagcagccgcgccgcgaacttgcaggcgcagtcgatgcgctgcaccgtcttgtcgacgcggtcgaacaggtccatcaccttgagctcccggtctttgtggaggcgctcgaggtcctcgagggccttctcgcggcgtcgctcgatggcggccttgtaggcgtggaaggcctcgttgatctgcgcctcggcgtcgtcgcgctgccgctgtaggtcgcccagcgcgtcgtccaggcgggcggaggc

SEQ ID NO: 1157 - DNA, 1272 bp, Plutella xylostella
catactgtgacattccggcccctcatgagctgacccatcagcccttcaagggatgacgctgacttttgggacaccctgtagataatcctatatatattttgtcataggcctcaagtattttttcgttttaccgcaatagaaatggtaatctgtgagcaaagagacaagatataacataaagcatagcaaagtagaaattcagccttgcagtttgtctaggcacataccgcatggactctggacgtctgaacatcctctcaatttcaaaggctcgtggtagagtcagcatgggcagcaggaaccacatggaacaccgcactgacgccaccacaaacattatgtagggtgtgaacagtagaaatgcatacagtagcaatgaggcagtctttccaatcaaaatagcaagagttacaatctctgctttgctatcagtttcaaggtctcttgtgttgttactatggaggatagcctcagtattcaaggccaggggtatagcataatatatgataggccaatccaccctccctgtctgagctaggaaagcaaacactactgacaaaggaccaaaaatgactagaactacaatatcacctaaagctatgtatttcagacctattccacctgtgtacaaaaaggatgaggacaatcctccaaaataaactaaggctaagtgttccatccgagctggtgatagaataactaaaggcacaaaaaatgcacatcctacaagatacaataaagcaccaagtgacaccacttcatcaatacttaggatatggtccactagagtcctgtcgtccgatttgcggttgtcaatgcctttgacaaaatcgaagtatgtgttgataacattgccagctccgtgcacgggtatgacggtgcacagtgtgagcaggaaggtgagccagctgaagctgtcgtctccgggcaggcggtaagcgagcgcggcgcccagcagcgtcggcaggaagctggcgctgagcgaccagggccgcagcgccagcacgtaggtccgcaccttcatcagcggattcctcggccctgtcgcctctttaggctgctccagaaggttcccttccactggcgcaatgtctccatcgtcggactttaagtcgtcactcattttattcatttgttgaaacaactgctacgtctgtagacgccagcaataccgagaccggtcggcaattagatcacaataccgttatattcgtaggttagattatttaacatatctgaacacggcaacgtaattaacacacattaaatttt

SEQ ID NO: 1158 - DNA, 1999 bp, Plutella xylostella
gacctatcttaaatcacatgtttatttcatatcatcaataatcttaatagtcagcagcagtattcgccaaataatcttttcttccaatattcgatgcttgcttgttttgcacagcctctagcttgggacattcagtgatcctgtgtccgagaccaccacagtacgagcagccctgcccgtcggccaccggcacgtctggctctccaatcatgtctagtaggaactctggcactttctgtttggcttctctgagcaagtgagctaagtctctgagcacgctgtcgtcggcggcgcggcccagcagcgtggtcgccacgccctcgccaccagctcgcccggtccttccgatcctgtgcacataattctctatatcctccggcatgtcgtagttgatcacatgctgaatgtttggaaagtccagacctttgctggcaacatctgtggctacaagcacatctttctctccctttctgaaggcatctacagcccgtgatctctcctcttggtctttaccaccgtgtattgctactgcttctactcccttgaggagcaggtattcatggactgcatcaacatcctgtttcctctcagcaaatactaaaacaggtggaggggtcttttgtaggcattggagtagatggacagtcctggcttcagctttgacaggctccaactcttgtctcacattaagggacgctgctccagctcgtcccacattcactgtgactggtttgactaaagctgatcgggcaaacacctgaatcttctttggcatagtagcactgaacagaagagtttgccgttgccctgtgaagtaagagaatattgttctcacatcttcttcaaagcccatgtctatcattcggtcagcctcatccatgcagaggtatctgcacacgctgagtcggaccattttcttgtcgagcatgtccatgagcctcccaggggtggccaccatgatgtgcaccccacgctgcaccgtctccatacactctgacaccggcaccccacctatagccagacaactcctgatctcaggcatcccgcacatcttaagatgcttaacaaaatgttgaataatttcatatgtctgctttgccaattctcttgatggacatatgattaaaccataaggtccctcattgttaatgaaaggcagcttgatctcttgatgcagacagaagcacagcaatggcaatgtgaatacaagagtctttccggacccagtgaatgcaataccaatcatatcccgtccactcagcacagttggtatgccttgcacttgaataggagtaggtttctttattcccttagcttctagtcctctgatgatgccttttggtagcttcatgtgctcaaaagtcttcaagggagggggtacatcttcaccctcgactagtatcttgagtttatctctcacttggtcgtgtctctcaggaggcagcgcgaggatgcaccgcggggctctccaggaagtcttaataggatcttcatactggatacctttggccaactcggcgactcccatgagggctttgttctgcgcgacgctctcgaggatgtgctgctcctcgcgcgcctggcgctcggccgcggacagagcgcgcgcctccgccagccgcttgagttcaccgtgctgttccaacagcgacacattgtacttgcggccccactcctcctgcgaggcgtcgtcgtccgggtcgttgtcgctggagctcttggcctcggcggacgcctccgtggccagctgcgtcagccgcccgagcttaatcagctgctgcttcttccgttctatgattggaacgtacgggacgtagttttcgaggtcttcctccgattctgacgacttctcctcgcgtctgtaacgcttaagaggtggtggcggcggttcttccttcttttcttccattgtgttttatgttaaaatatcggttctaataaagtttttactataaacacaacaaaaaataaaatgataaacacatgaagagttgaagac

SEQ ID NO: 1159 - DNA, 2301 bp, Plutella xylostella
tgtatagtaataacaataaataagtaatcaacacttcactgtatggtgacgctagctttatgatggttcttgaggtagtagagctgcgcctgcgcctccagctcctgcagctggctcaccaccggcgccatctggctcacgtggtccttatatcccgtgccgatttgtttcctcttctcgccgtagacgaccttcccgtcgaactcgttgctgggcaccttcatgtccgactccacctgctgaatcgtgatgttcaggtgctcctcgatgtccgccaggtactgtggttcgttgtaccacacgcagcagcccttgggccggtcggtagtgaggctcgtgttgaagcagttgcggccgcgcgacgagcaccactcgccgtggtaccacaccttctccggcacggtggagacgaggctgatggcgagccccatgcgctcggcgcgccccacgcgcccgatgcggtgcacgtagttggacttctcatcgggaagagtgatgttgatcatgaaaggcaatccagagatatcaatccctctagccgcgacgtccgtacagatcaagaacttgacctccgcctgcttgaacttctcgaggttggccttgcgctcctgcggcttgcggtccccgtgcaggcacacgcacgagtactgggagccgccgagcgacttgaagaagcgttccaggttgtcgcagtcgatctttgtgcggcagaagattattgccctgtccatcttgtgttcgttgatggcgcgcacgcagtactctcccttgagtatcttgacggcctcggagagcgtctcgggcgtggtgttgccgctgcggatgttgtccttggcgtgcacaccgtccgtttgcacgtgtttgcgcagcgtctcccaggcccggtcccgctgcgggtccacgttgaccaccacgtggtgcacggtctccggcaccgcgtcctcgcccttcaggtccacccacgtggggaagtgcatcagcttctccgccatcttcttaacctcaaaggcgtgtaacgtcgcggaacacaccaccatctgcaggcggcgtccgtcggacgtgatcttggggatctgccggtgcaggcgctcgatcagctccgtgtagcccgccttcagcagcccgtccgcctcgtcgaggacgaagaagcggcagtgcgtgagcgccaggtagcctccctgtataagatcctcgagtcttcccggggtgcccaccactatatccaccccggcattgagctggctgatctggtccttgacgttgacgccgcccaccaccagcagctcgcgcaccgccgggtccgacaggtgcttcttgaacttgctgatctgagtgcaggtttgctctgcgagctcgcgggacggctcaataataatagcttgcggcgcgttgttaactggcttgcagtcgacggcggcggcggcggacaccacgttcagcttcacgcagtccttggccgccgccgacaccgccacgtaagccgccggcggctcgtgcttgaaaggtgtagctccaaagttgaagctcatctctgcattcttgagcaccacagcggggaagtagcagtccttgcgccgcgcggggtccagcacaaacgccactcccaggtcttcaccattctttgtgtaccggatctcaccattgttcaggtttagtagacagccaatgacatcattctttccaaatgcagagccatagtcatcaaagtttttggcattagactttttgccagttcctccaaacccaaagcccagtttacatgtgcccaggtcaagtcgagctgcttgagtagaccatcccactcggcacaggccttcatcagtgacggtggcctcgtagtagtaggcacccttcgagtggacgccattggtggcgcggccgccatgccagccgttgtggtcccgggactggcagcgcagcccatctggagtcactgcgagcgcatcggtacgatcgaaaaacgacatcgtccagtttgatgaagtcgtcaggatgaccttactggtcttcccttcttgtatatctttcagcgtctcccatactatctgtaggatgggcagacagaaagcgccagtctttccactgccggtctctgcagccatgaggacgtctcctccaccaagaataagtggtatagcttcagcctgcacgtccgtggggagggtccattccatttcatcaatggctttccccagctcggggagtaccccgaactcttcgaaggcagtcatagtaaaattatattgaaattatttcaagaaatttcgatatccaaaaacacaacacggcacgatcgccggg

SEQ ID NO: 1160 - DNA, 1159 bp, Plutella xylostella
agggaacggagatgccaaagtgcaagtctaggtccaccaccacaaacctaaaacgaagaatctgatctctatagttaaacgtagtgcacaggtctatatctgggcttgagccagctatagccagcaccttatcagggctcgtcctcatcacagctgagtatacagttgtggcagacactgggagttccaccttcacctctccggagtatgacagctggtacagatgcttcgctgctcccccggcaaccacacagtcatcgtggaagaaggacacatggatgccatggtcagggatgtcaaacactgtgacaacatccagggaacggagatgccaaagtgctagtctaggtccaccaccacaaacaatccaatcatcactcaaagaggcagccccaacccatttgcctatatccggtcgggcaacattactgttgctgtgtggctctatactgttgtgagatttgcctgttctggtgtcccacagcttcacggaaccatcctcactggcagatatcagctgatcagactttccatcaatgcagtgtatgaaatcatcatgtcccaaatacttcaacttcaagctaacagtctctaacgtgaaggaataaatattgttatccccgcaaccagcaaacaaagtttctttatcttcagataaccacaagcaattcacatcctgttgctctacaggtacctttgagggtatactgacttgccagtgaggtttgcccagcttagaagaggttatggaagaccattcatagctgatgatctcaccagcagttccaattataaggttattctcggtggataaaagactgcacacttgttttccagttagaatattatgtatgtgcttcggtttgttgtagtcacttgtgagtaattccacaaccggattcagtagtcggttgagatcaaagacggctatctggccataaatgttgccggcaagcaaatattgcccacatggtgaaaatgcctggctgagaacagtactgtaaatatttttatccaacattttaacgatgaaggattatacttatactgtaaggtttcaaactgtgttttttgtaaatcacagcagctttagaaatcacgttcaaaaaaataaaataaaatgttctaaaataaaagtcaaattagttttgtttacgtt

SEQ ID NO: 1161 - DNA, 6142 bp, Plutella xylostella
ctgcagcaagcaaagtaaaggccgattcccacatatcagtgttgcttcagtgctctcagtacctatcaataattttcaatgtgcgaatcggcttataatcattattgtataaaatagaacgggtcgccgccgccgcgccgatcccgagccacgagcgagccagacagaatgaaatcggcttccttcgggcttcgttcggttcggctcgattcttgtttgctatgtttctgtttttactctatggctcgagataggcgagtctcggtgctgtgctggctgatttcaacaatagtataatgctaatcatttaggaaaaaaaaactctatggttgggttgagaacggatccgatttgtgttttgtttttcttgtgtcgtctgtgagttgtgtttattatttttgacgtttaaattaaataaacaaaaacaagtgaggatattattgaagtgtgttattaagtacttaagtacctacctactccactaaaaagttattgaaagactgaaaatccttagcacaaaacgatggcctcgagaaagaaaaatatggatgtgttccttaaagaagtatttgttagatacattgccatacaagatgcggactacaagaaggcccaatcagtattcaacagtgtgtttgaccaagttaagcagaagatgtgtgagcaagacagttactatgggaaatatgctaacgaagtgttaaacgcgggcagcgtgtacgacggcatcaaggtggggcgtctcgacgagttcgacctggacgtggtggtgcggctccccatcagctacgaggacggggacctcggcatcgtggtcgagaaccagcggcccggcttcgtcaagctgaagatcgccagcgccttcgaccatcttgataaacagcaggactgggagaagtgccacaaggtgactcgggactggcgcgatgcagacaagtacttcctacagaacaagttccgtcagtggatgcaccgggtggtgcagcgagcggtcaacgacctcggcggacaggtgtctgttggcgacgtggtgtatttgctcacttttaaggagtctgggccagcgtacactctcaacatccggaaccagaagggggcggaggcgttcacgctggacgtggacctggtgccgtgcatccggttcatgctgccgcgctggcccgaggggtacaggtcagtagaaggcagtcaagagaagaaatggctggtggtgccgaaacccctcaagtccttgaccgacgcgaccctcaagaaccggtgctggcgcctcgccttccacgacttcgagagggaacacatcaagggctgcgaccatttgaagatgaccatcagactgctcaaaaaactgcgcgacgcgctcgagctgcgtgagatcgccagctactacatcaagacgctgttcctgtgggagatcgacgagcgccaggacaagaagtactggcggaacaagatcagcgtgctcttccaacacatgaccaggaaactgtacgaggcagtcgacgcccacaacatcccatacttctggcagaaagaccacaacctcatcgagggattaaaacccagcctgcagaaactatacgcgagtaaattgaagaatgtcgtcaatagaatagagacgaacgatatcgatagcgtcgtcgcggctctactgactcctgaagagttggtagactttagaagctcagagttttaccaatcgtttcctgagacgactgtggcggatgtagtgccgtctccgtcagtctcccgacaagagtcaaacaagtccataacggcagtcgacggaacccaaaatgtcactagagataatgaaacaaacgagctattgagagagctactcgcgtccaacaagcgactcgaaggcaagttcgaatcgcttatcaaacgaatcgagaacaaagtcgattgtttaagtaagactgttgatgatctcaatgctctggtaagagctaagccgtctagtcagactgaaacaggtgatgccttagattccttgaaggatttgaagatttctgatgaagagaatgttaaaaatgcttcagtgaatggggaaatgataatgaatgtgctcagtagcttcagtgccgtagaaactggctcggatttacttattaacatttgaaactttttttatgcgatttattattttacttatttacattatattatcacgtacctagttcgtaagactgagattatttttgttttagttcatacggtcccatggggctatatgtataagtatggtattcacttttcatcctatttttatgttatcaaagtaatttatgatttcattttatgtttaaggataatctgtttcattaattaaatttttattacaatttttactagtattttcgaattatgactggccaaccataaaaaatgtaggttaaaagttcaaaacgcaatgatacagcctttattaagttttattcctttgttataaacggagtaaaaactagaaatacaagttctttgaaatatacaagaatgctagaaacgccacatacaaacaaatagttatagtatgacataaataaatatcagtaaaaaatatgcggctgtattcaattgattttgaaagaaagcaaccttattaacaaactttaattatctaaagcaactggtgttttgcgacctatccataaatgttgtttatggaagaacctaacttaatgtaactaatatttaatgcaaatgtgtacaaacgctttctaaacaaccttataaaacatccttaaaggacaaatctaaagggtaaccaactgcaatttaaaaaatgctagtatctatttatctagttcaataattagggttaatttcagcattctgtgttgcccaaatacaaactcgttaatttcattatcatcattaatcgatacttaagtcccattcctaaaaaaaaattgaaaccaatataatcttgctgaaatatttacaggatttcgaactacctatgttatgttataactttatactgcatgttttctattttgtaaatgtatggggcttaaacatttacaatgtaagtagttcaataggtataaagttaagagcacctcacgccatactttttgacttaaattcagtattcttttcagagatgtgtattttttagttcttgctcaggactgtttaattaaactaatgcaccagtcccaaaaaaaaatactgaacgtaagcgtttcatttccatttttaccttgaagcttagaacttgcgttgaaacgccaataggttatgcttttttatgagttctgtggaggacgtctgaagggttaactacgatttatgtttccctcaaagaattagaggttttgtttataacttaggtgtattaatttttaatattctcaagcttgattatttctcaattttgcaatatttattcaggaaacaaattaatgtggacagtgttaacatgaaaggcgctaatcatccattccaaagctaattttaacttcaatctcaacaattttctactagctacatataatacaaattagagctactaaacgcgctatattaatgagcaataaagttacagggatcatgccatcatttacgacggagagagaaagttatagaaatgcgtagcgtaacttaatcgattggatgttatgaatcgtaacttagtaaatatcggcttatattataccaatacctgctcaagttaggctgttattcaatcataaacataatgtattgtttctttcatacaaatattttattaattctattttacattggtatcttatataaacataaatataatgtgcagtccaagcagtatattatttttgaattaaacacctagtgactttaactatacttctcaaactgcgggctatatgagtctgacttcataaagaaataaaataaatatttaaaaacataaaaaagaaatttcttgaacataagtcaactatagaatagaattgtataattcaagtatttaaaaataaatacagattggtacttaaataaaatttagagtctgagttgtaaacatatttatacaataaactatgaaattattttcgaagtgggactcatataaccacgaacgactagctatcaactcttgggaccaaaccggtgcaattttagcaaaaaatgtacaacagccaatattttgaaatattattacacaaacaatcttgtcgatgtggatttggtcctccttttgtattcaagatctgagaaattgcaacaagaatgtcgatgtttttttagtattatttcaattgattcgtaactaatgttcaaatatcccactgtagcccgctgctaacggttgcaccaaaaagataaacgtttagtattaaaactatttgtaagatgttattattcattttcagatcttttagcgtttaattataagtaggtatatatcttcttggttcaatgttacacagaattgtttttttactttgatccacgttgctactttaactttacaaggtccaatatcttgttaaactttatccatcatgtcgctccgaatataataaacttaacgtctctttattttctaacaatacgagataataagtataatagtatatatttatttatatacgtaatatattataattagaggatctaaatattctaacatagtacatggttaaaagtctaaatcataactacttataagcatatataggtatagttttggaatgacgataagggtttgggaaatgaaatagctatgatatgttcatatgctataagtagctatagttagacaatttcttaggctttagatgtgccatttaaatgtttgctgcttcaatagtataaaataatgcagaacttataaaatgtttaaataaaaaaatacaaaatgattttaacactatgaatgtcacatctaaatttgagagagtgcattaacagaagcttatctatttacttacaacagtgaagaatatttgtgactattcatacattattaatttattacagtatttaatgttgcactgaaagttcagcaaaaacacattttttgtgtccttactctgtgcttcgatcgtatatcgaaaaaaaagaattaaaaaatcatcacaaatattcgacattgttcagttaggtacaataatccaatatgtcggtgataatcgcctcaatttctcaaatatttcataaattaatattctttcttcattgtcttttttgattgaatagtatctttagtattacagattttcctattatacgtaaactactaaagttgccgttgttgcatacaaaatacgtcatcataaaacatactaagaagatgtaagccgcagatgacagaagaaagtagtttttttttgtttacgtaaattacaaaatctgtgcttacataacaatcccacccaatcagaagtaagtaactgactattgaatgagtgaggtacaaccaaacttactgacctttatcacaaatcttccacaatatcgttaaactgagacaattgccccctgacaaggatgtgtgctggtgccgtgagttaacgcgagctgcctgatttactgtgcgcgatgagccactgcagcgtgatgtcgatgttgtccttctccttgcaagagatggagtagcagcagatctcgcggtcttggatcgctgataggttcatcctctcgatgagtccatgttcatccagcgcatgcggcaggtcccgcttgttgcccagcaccagcacggggatgcccgtgagctgctgcttctccagcaggctgtgcagctcgttgcgcgacgcctcgatcttgtccgggtccgccgcgtccaccatgtaaacaatagcattgacacctctgcaatacctttcccacattgacctaaaccgaggctggcctccaatatcccaaaccttgatggtaacttgtcctttggtgattttacgcatattgaaaccaactgtagggatcatgtcttcactaaactgtccagaagcaatgacgttaacaaaagtagtttttcccgagtattgaagccctactaatgtaagctccatttcctccttccagaaaagactttttatccaatcaaggatacgattaatcaaggctatcatttttgctggatttattcactaaattatttccgaaacaaaaaattaacgcctcctttggaaactgcaaattt

SEQ ID NO: 1162 - DNA, 1161 bp, Plutella xylostella
tcagatgcattgacttatatattactagcgtaaggacaggcccaaccaccctagaaaatgacaccttcgctttgtatgaattagggccagcgcgcgggtgccattttcttttgacaaaactttctgacgggcgtatccttccttttgaaatcattgatcagatgtctttccccgtggaatgggatatagacgcaaatattaagcgcaaaatacacacctcctaactccacttccacaactatataaaaacttagttacaactgagtgcaatacatactagcaccaccgttcctgttcacacacttcatatatcgctgttgaggtcgagcaccaccttctccccgggcttgaacgccggcatgccgaggtaggggcaggtggcgcagcggaacgcatcgcccaggtaacaactgccgcaggaagacttgggtgtctccttggtctgccccgccagctcttcggcaagcccgcaggagcagtccgcacaggcttttctcttacccgtggtggcacatactcttaaagattgttcatctggtttcttgaggtcatcttcatcaaggagttggtctgagtcaatgatgtcatcatctttgcctctgctccatgccgcttctactgtctcatctagcttccatacaccagagttgccaccgagttttagtggggctttggaaccaacctcaaagtttggtttctctgctgtgtaaacatctccaacttttgtaacattcaaaaacccattcaatttgagagagctggatagttctgtggtatcttttagtatcactgtaccgtttggcttgaggagtttcacgattatagataacagactatcactgtgtgttattgaatgaggatgagtccaatttgatatgatcacgttaaatgtggagtgtggacgtgacgattcagtcagcatttccgagttttctagagccactgaaccattaccacaggcaccttgaaggtctttcacaatgttacccagcgcttcttgatcgctcttgttccagattacgaggacgtggtctccactctttactttatccattgtgaatctatagagcgcgtacttttatgttaacttctattcttgtcgacttttcaaacgtgattgactaaaatccgctggaatcgcagagcgcaatttcatgaaat

SEQ ID NO: 1163 - DNA, 3282 bp, Plutella xylostella
aaccttcctttccataaatgtataaatgtcaagattcaagatatatgatattaacaattactgttttttatgtatattcatgtataggtactgaatacatacgagtactacagtacccgacataataagaaacctattgcccgcaccacataagaataccctaaaataaatagtctctataatattaagcctccagaattgtttatggtttcactgatatccattgaaatttagcattcacttgtaacagataactgatttattgttgatatttatcgagtaattttacagttttttttttgttatactttaaacataactcaaaacataaatctaaagcgttaaacctttcagataacaacaatatcaccattttctaaaacacacacacaaaacaacatgctctacttacagttaaagtagaaacgcacctatattcgataccatcttacaccatttctgcccccaagagacatcaaaaacttccatcagcattctactgaacgcttcgtgttataacttctgaggcacagttaaggtgaaacctatcggatctgtgaatgttgcttgttgcacattaaccgtagatctgttatgacgcatgtgactcttaaccagatcagaattgaccagtgcagccatcaagctaagctctccagctaacaccgtcgcgcagatcaaagaagctagtctagcgctgttttccgctgggcgtttacctgcacctttgacgcccaagatctcgagacaagccccttggccagacaaaaccgttccaccgccaactgttcccacttccagacaaggcatggtgcaagtcacgtataagtcttcgccgtgttccccacatggttccatgctggtggagcattggctgcttgtgacattctgggctggatcttgccctgtggctatgaatatagctgttaccatgttagctgcgtgtgcgttgttgccgccaatagatcctgctagagccgagccagagaggttcttgatcttgttgcatctggccaaagttctggcgtcggttttgaatacgtttcggagcgcttcgttagtaattgtcgtttcgcaaaccactcttttacctcggcctttcacccagtttatagcggccgcttttttgtccgaacagtagtttccagacagactgatgacttccatgtctgggaagtaggttttgaggagtttcagggcgttttcagcacccttggataccatgttcatgcccatagcgtcacctgtagtcgctctaaagcgaagatataaggtagcgccgtctactcctatgtggacttcttggagtctggcaaatcgggatgtggagtcgaaagcatccttgatgatggcatagttagccgcattgtctagccactgcctgacttcgtgcgctcggaccacattggggaacctgacagccggggcgcgcgtcataccgacatcttccactactgatatgactcctctcgttccaatcgctttggctcctctgttggttgacgctactaaagccccttctgtcgtagccattgggatcatgtacggtttgccgtcaacgtataaaggaccggcgtatcctactggcactcctatgaagccaatgacgttttcgcagcaagcgttcaggactttgctgtaatcgtagttcaggtatggaagctgtttcacggcatcttcagtttggaaacgtgctgatacgactcttctgcgcagtcgcacgcctctcagagggtcgccgaggactgattcaagtctgtgaagaggaatgtgcgactgttccaccagcatcacaacttcttcgtcactcagagacacacagccaccttcggagcggtagatttcgaggcattccgccattggtcgtttcttggcattgagcttagaggcagatgaactgggcgacagtaccggccaatcagaatcgtcaatgttcgggactgagtcttcagtttgcgttgaaacctcgctgttagcatcgtctcctacagagaacagtggtcgtctgccaggcgcaagattggtggacgatgaagatttttctcttttatgtttggtcacttctttaaccgtcatgtcgttcatgtcgataatgaggttccttggttcttcgaagaaaatgaacttgataatgagagcaatgagcagtgtggctatcactatgtaatctgcactaaccgagaaccacttgacgtacgaattcagaagtacgttctcaccatccataggtgtcgaagtatcattcatgggaccctcaatgttagaaatatcgttgctccacggccatcggctggtcaagtgcacgcacaggagtcccgctgccattatcatctttactctctgcaccacagggttaggtttcaaagcaacttcactaaacggatggtcagacgtcgcgtccttccttccagaagtgaaatccgctaccagcgacaagcacgccgggtagaacgacacaaacacgacataatcaaccagtaaagctatgcaggcgaaggtgcacatatgttccaaccgaggcaccccagacaacgctccgactccaaccaataggatcgcgagcagtgtgtccaaagtagccgtaggtcctaacaaagccaaggctttcccgaccctcttcccttgatcctcgccagccgcccagccagcccgcgccatcctcgcccctctagccacatccgcgaccagaagaaacaaaaacggcgcatcctttatgctggcgagctcgctccagaacaaattggccaaggctgaagtgaatacaaaactggcgaaggtggaaaacatgccagctatgatcagcaggtatttggacgcgattttatgtaggttcatcacttggtagtaggcgtataggagggcagcgcatcggactatggtcatgatgactgcgtctgccgcttggtactctgcctcgaggcctggacaggctctagcccagccggcgcacctctcagctccgttgccgacgccatgccgctcaacgctcgctgcgcaggccagcagagctagtgtggccactataacctcccattggtgtcgcgcgcagaattctccatgggcgccccaaacctgcatccttgtgtcagggttactgctatgtagctgtgtgacagctgatatcagcaatttgtgtggaggaacaagtagagtttcagtctctttacactttcaatcatgtgaagaaacagtagatccacggaactatttaatttttaaattaaaaattatgaaattaaattgacactgacacacttcaacctttcgccattgttcggtgtt

SEQ ID NO: 1164 - DNA, 1540 bp, Plutella xylostella
gggctgagcctcgccgtcagctccgtcgccttctcctgcatcgtgaagggacagccggtgctgctctatgcttacagcggtttcctgggggcgatctccataatgatcgcgggcgtgggcatgtcgttgttctgctaccgagagaccttccccaagggcctgcacgacggcctcacgcagagtgtgctcacatacgaccccgaccggaacaacatcgacttcgctcaagctaatatgcaatgctgtggcgtgtccaactacacggactgggtgcgcctgtccccgaagcgcgtgatccccttctcctgctgcgtggaccccacgcactgcgtcatcgccaactacagcgatgtctatcagaagggctgctacgatacgatgctggagtacatggataacaatatgaacatcatagtgggcgtggcgctcggcaccgccatgctccccatgatcggcaccctggtagcctgcagcctcgctgaggccatcaataaagccaaatacgacgaaatcaattaaatctaaatactgaactgagcaacttttttgaactattttttttctactaaattattactaaagttaagtatatctatagttaggacaataaaagccaaattgttaagaaatatgtttttacggtatgttgtgtgatatttttaattaatttataatctaatttgttattgtataggttgtgattttaacatttattatgtgcgtacctattggtaatcttccttctgtccctacttgatatcctgattgacaaaaggcaaagcccaacggattctgtacgaaataaaaagtagtttagtaaagcatacctaaaaaaactagttttattcaataaacaagacagttttcaatgaaatattttattatgacaacataaagttattctgaaatattttcaagtatttattaagttagatcatcacagccttaacttgtgatcaggtcttcaactccttatcattgagaccagcatggaaatttcttgcagttttaagcacttcccaaatgaagtaaagtgctataattatcatatttacattggaaacaatatgccatgatctgggtctctctcttatctcataatttattggagccatgaacaatgaacatgccattgacgcataatcaatattgtggtttgcattgaccccttgacctatatttgtatctagtcactgtcggaactgttcttgtcttccttggccacctcgggcacgtcctgcttgtagtgtcggtactccggcttcagctcccacatgttcttatgagggttctttatgttgtaattacaaacttctttgaggatctctttcaggtacactataggttgtcttgtaatcttctgcagatccttgatattgtagtattgatgcttctcaaaggcagcaaacagcatgttgagcacagcatctttgtcatctcgggctttctttccttctgctttcttcttctcctggtactcaatattatgcctgtggtctgacactggcttgaagttttgtactattctgtccaactgttg

SEQ ID NO: 1165 - DNA, 2155 bp, Plutella xylostella
cggtcatattctaataaatctccataagcaatttccgtcagttaaccatttacctacaatgaaattaaaatgaatataggatctctctatcgtccatgatccatccattggctataataaattcgtataaaggtgcgcgcagatattgtgcggcatgtctctatatccggcaagtctatagaatccggcaaatatcctgcagtccgcgaatgccgggaacacacacatgccgtgtaatatctggtaagcatcctggaagatccgttgtcatatcgagtcaaactgagattacatatttacatagtaaggatatcttaaaagtattaacttgaaactatacctacctaatagccttatgtatttatatggcatgtaaatgcactaatttggtcatgtgtttaaatacttatgcctataaacttttctacacccataaaagcttagttacatgataaggcagtataatgtcagaacttattttgcttacacattattaactttatcatttaggacctgtagttctgtcccgtctatactagcacatacagcaccatttctctctttatgtaattcttcagtttcatccacatccttacctaaatttccttgcaacaaaacctgtatctcttgcaaacttttccctttggtctcaggaacaaataaaatcacaaataaagcaccaaaaaaggtgacaccagcaaaaatccagaacacaccataaaggcctgttagatccttaatagtttgatagcttaaagtcgtgatgaaaccaactatccctccgaaaatgtttaaggatgtcatagcaaccgccttaacgttaatggggaatatttccgctggtattacaaagattaaggagatgtagccgagtgtagatataacatttgatatgacgatgccagtaaagggtataaaggcaatatgggatagaaaggtatcttcaatctttatgacctctttgaggaagaaataggtcccaacaagagctaggaaaagtccggtgccgaagaatgaattgtagagaaaaggtcttctgccgaatcgatccactagcatggtggacatgaggcctacaacaaacctcacgagtccaaacacgatgagtacagtcggcagcggcaggcgcacgcggctctcctgcacgatgcggcccaggtactgctggatcgtcttcgcgccgctcattatttgcgccattttcaaacctgccgcaataacgatagctttcctgtactgcggtcctgtaaatagttcccagactgaggaagacctcttcatttcattctgtacatttgcctgtaataatgccagctcatcgtcgagagtctttgcattcttaaaacctttaagccttcccaattccttcccagcggcacccactcggccctccttcaaatggtaatacggagactcagggatccacaaacaagcgcaaaagtatcccactggcaacaccagaagcaaacaattaatcacgtagtaagagacaaacgaccctatggccatcatcataagactgcccaagctgaacatgacgcgggtggaaagagacagagtacctctgatgtccttgtctgctatttctgctaggtatattggcaccacagttccaatcataccagttccactgccccagaggtattgactcaagcaaagcatccatccctgaacagcggataatgcgaacacagcaccaacaacgtaaggcagagcgctggccagcaacgtggcgcgccggccgaggcggtcgcacacgaaccttgtggccaggctgccgctcatgaaccccggctcgttcatggccagcatccatgatacctccctatcagtaatggaaatatcggtctcattattgtgcagcttcatcaagaccggggtggaccaggccgtgatgacacccaccgtcagtgacgctattgacacgcagaaggttgtaatgtactgtacttttctgtcacccgaatccatattgtaagtatgtacttaggtaggtaggtacagatgcttttgtcctaaaggtttgtcaatttaatcttagcaaagcatccggtggcaaatcgtagacatcgtagtaaccagtttacttttacatagataacagctgttaaatatacctatctaaacttaacttaaaaaaaaacgtttaataaag

SEQ ID NO: 1166 - DNA, 3161 bp, Plutella xylostella
ttttttttgttatttacgaattttattgatcagcagcattgatttacgaataatattgattagcaacagtagcgacgtacttaagatttagatatgccattgcattgcttcacattataacgggttcatcaatcatcatatttacagtaggtacatatacatatcgtttcttgggagaataatattgtgatcagcactagtgatgaaggtattgtggctaaatgatgatgacatcaaatgtggaggcttaatgttaaataaaaatatacttacagaaatgcactagtactgtattgtatactagtttaagtgagtactgagtgtgtgaggggatatgttatgtaagtaagtacttcattgtacaaataactcctcggatcttgtgaaattctccggacatggaagtagtttaaaaaatactgaaatctgaactttcttatacgagtttcagtattatacttatctaattaaatcataactgaccactctactatttaaaaaaaatgttgctgctttcctaataaaacccataacatcacaacttttcatttatttaagtatataattatatacattatactgtctgttacgtacacaaaactttataaataatatacagatttgtattgcgttattcatacataagttagacatttaggtactgatagtagccagcttttaacaaaagcctttgattgatcggttaaagattacgaacataaaatggtgttgtcatatcatatttatggcaaagcacagcaccaagaaccggatatcatgtacatacatatttaaaattatgaaaaagtaagatacaattaaatttatatgaccaaaaacaacgtattaggttacgtaattagattttatactaaaagtaccaaaaatcaaatgtgcaacagttcatttattaaatataatgccaccataaacaaggaaaaataatataatatataatctatacttatgaagaaaaataacagtaactgaaaaagcttgcaataaacttcatcacatgcatctcttacatcaagcttaaactaattattcttattattaattacatatacttacatacaccactctgttcatacataagtgatttcgctatcgctgtctatagtgataccgagtgagtccgcgatgtcgcacgacagtcgagcgcgatatcagtctggtctgaacaaagttttataaatcttattcaagtatttttaatccagtttgtacacccagtgtttgtatttttaaatgcaatcctaactaacttttatagcagtttaaaaaaacataaatacagacgaattcggaacctcttccttttttttgaagtcagttgaaaatagagtatacttaagtcataatacaaaattctggttactgagtgcatttacaaaataaactattgttagcgcgacatagagtggcaaacattaatgaataaacccatcgctcaaaccacctgaaaagaataccatatcgataataagatagcatcatgataatcaagaaacacacccaaataggagaaaacctaaatgtacaatgattagttaacctcctctgatacagtcacatgaaaactaaaattgaactaattttattgttgctgtttacaaaactatgtaactttaaatatttttattccagaagctataactacatacattacaaattattattgtgtattgctaaatgtctctataacctttcattaattgcagaacagactaacgatacaccaggcaactcacttgaacacatttttatgctattgaagttccatgtacacaacttccttgaatctgtatttacacttagtaaaataaaatatttacatacttaaaaaaacagtattgaaaaattatatttgtaagatattctttggatatatgatgaatggtgcattttcattacatctttcagaaaaatgtagtcatgcttatgttatgacttaactaccctgaccatttctacactcttatcaggatcatattttgcatgttttttagagtgcaaattaaatggtttttttgcataaataaacagtacctactcagtttcatgaaatataggtatccaaagaattcactgagacatatttaaacatatacaaacacacctcccttactggttcattgtaaactgtcctgacttcgttcagttaactcctcacttatttatatgaatttgtaatgtctaaggtgctttataaatcttaagtgaacacaatacatgtttttttgttgttaagtagtttcattcattaaaatatttgggtgaatatctataagtatatacaagctatatatttttattacttatctacaaaaccaattggcgtattctaaaatgtggtttgttcattgcaagataatgctatgaaagatgttgtgcaaattattgttatcaccattacaaaattagatctattcatttaagctaaatagtgaacttatctacctggttcctttatgagacaacacatccatttttctcttgaatatttccatcggatctctcaatttctagcagcattgcgtggaacaagtctgtcactgattcattttgctttgcactagtttcaatgaaggccgccttccatttctcagcaagtctctttccctcctcggtacttatctttctctccatgtgtaaatcagttttattgccaacaagtactatgggtacgtgaatttttccaaccatgtccagtagcttatcataaatgatttgtactatctggaaactcttactagaggtgatggagtataccaacacatagccatggaagtccatgctgtactgagggggaaatatgctgtactcatcttgaccagcggtgtctacaagcttcacttcatattccgttgaattcaatcttatgtacttggtaaaggtgttttcgatggtgggatcataagaatcgacgaattgcccctcaacaaactgaataattagcgatgatttcccaacggatctgtagcccatcatggcaatttttctttgtttagaaggcattttatccaatagtaagaattaaatgacaacgatacaagatcaaaataagcacagtcttttatttttactattttctactcatacaaaaagtcaaaaaagaaatacaaagatgagagatttcgggcagggttgccttctct

SEQ ID NO: 1167 - DNA, 1350 bp, Plutella xylostella
gcatccgacacgcatccgacacgcatccgacacgcatccgacgcgcttccgtcacgtgtcgtcacgtttagcaccagcggaagggcacggcgcgcgggcggtcggcgccctccttcaccagcggcttgtggaactcgcgccccggacgcgagtggatcgtcgcccagcagtgctcgcagtaatactgtaggcaggtcacgttggcgcagaagaagggcgcgaacttggagccgcagcgcgcgcccgcgcactcgtcgcacatctggtcgtcgaggacgtacggcttcacctcgacccgcttgtcgatgtcgccgtgctgcagctgcacgaagcgcgccgagatggccgcgatgtacgactgctggttcgagaacgccacccgccccgcgcctttgggatacttgagctcggggtcggtgtcgatgccggcgtagcacacgccgccgtacagccggtccattatcatcgccaactccacagctttcagcggacgtggcacgccgcccacaaacacagtcttgcgcgggtccagaggcatactagcgtccagcacgaaatccgcatcagccagccgccacggccggatctggaccggcttgtcgcggatggtcggcgacgacacgcagaggtagagcttgtcgtcgtccgtgatgcacgcctccatgagggcagctactgaactctcgtcttgaaacagtaaaaacgcgtaacccttgggcggaaaataactcttgctctcagctttgtggggccagtccaccaccagcgggccgaaccgccggaacgaggacgtaatctcgtcctcatcaatgtccggtggcagtccaccaacaaacaccttccggctgaagcgctcgccgtgctcggagccagcagacaccggggacgagcgcgccggcgaccccagcgctgcagcactcagcctgttgaccacgtcctgcgtctggtcggggccggggggcgagcccgcgcccgccgccgccaccgccgcctcctccacgcccgggaagaacggggacttgcctttcatgtggtccgacgtgtccgctcgcatgatatctgtgaggtagtgctcgagggaacgcatgttgtctaggcctgaacgttcctggtagtgttcctccggcttgccagggtaggagtgcgtgcgacggtagtctggcggccgcggcggtgccggggctctcctccatggggcaaatgccgagggctgcggctgctgtggcgccggccacctatactgcggagccctacggaaaggggctctgtattgccgttcgtcgtcggccacactaggggcgccagggtattggagctcccccatctaacgaccggactcgacggaggccg

SEQ ID NO: 1168 - DNA, 3114 bp, Plutella xylostella
gggcttactgccaaaaagcattttcgttttcctaatttgcaaaacccgtactagaggccctgtattacctactaattattttatttccagtgctgctgggaacctataagtccttccataagcatcgcatggcttcacagctatgtatatgcaagcatgttttaaagcttttatacagatttttcttactaacttggtaactactttcattttgtaaaatgtatttttttgtcaatttcaaagatgatttcacaaagtgtgtctttgtaactacactacacgagaaaaattaaaatattagaagacaataaaccagatttcacactgtatctctaagaatgtgatcgcgttcaataattattatacctacctctagttttaaaaagtctcaattctgctactacaattcatgcgattttttaaccatcaatttttgtaaataaaatattattgcatagtaatttcggcggtgatctggggaaggacgcggtagggcgtggtgctaggttcgattctcgtcgtgtaatgtagttgcagttgcataatatcctggtgcagggacataatcagtctcaggatctttgtgaagtattccagtcgctggctgcttatactgtggccattggctttctgaccaccaacaaccgtactacaggggaggggtttcgcaacgcctatcgtcactgtgcctttatcagcacacttgatcgccgcgacagcggtagccagtggactacgcgacacatcgacaccattgactgtcattagccggtctcctggagccagccgcccgtctgccgccgccgcgccgccggagacgactgaacgaaccacgatcactgagctgcctggctctgatgggtccagatagtcgagtatggagaagccgaggccgcggtcctgcttctgcaggtggatgagctcgagctggtcgctccacatggcgagcccgctcagtggctccagggaacgggatttgttgcgctccaagctctctatgcagaactcatcatgatcgtgcccggctgacatgacagtactagcgctgcagagggaagccacggagctctccgacttagccttgatcagtctttgaggcggagacagcaggtcttgcagggaacctcctagggtatttctagcatatattcgttgcgcgtcgtctctcctagcccgagcgcacaccagccgcaccggtgacgtcaccgctcgcagtcgggacaccacctccacatgatgcgctcctagtactttccaaccatttacctccagtagctcatcgccaacagtatgcactcgtagtttggccacaggtccgttgggcgcaatagcacgtatgtagtgtctcgcttgcacctcccgcccacccactacccgcaccgtgccttcgagcgagatgcctagacccgtgttcttctctttcattattgtgcccacaataatatcatatccatgatcgtgacccggccaatcaggctctttctccagaatgtcccgccatttgtcctgtatcctcctcacatctgccttctctgcgttgtcatcatctacgcctatcacaatctcttgctcttctgtaggggaagtaggggaggggaggtggggtgctgcctccgaatctggctcggtttctattactgttgattcttcatacacactaaagctatatttggttaacgacgtaacactagggctggggggtgccacgggtctaccgtcctgcgccgcgagcgccctctgaagcttctcaaaccccgcccctcgcaggtacctcatagccttcagtctcactataggccccttggcgtctcggagtagggccaccgctcggtggttggagactccgttcagggataccccgtccacctcaacgatcctgtcgttgacttgtatcttcccgcacaagtcggccgcgctgcccactccgatgctctttatgaagatgccgctcagctcctcctgttcacacacgtatccggcgacggtgatgccgaggcccagggccgagtccttgttgagctccacctcgtagctgagcgtctctggggtgctggtgcctcttactgccatgtctagagggagcctcataggctgcgtctggtccgcgggggtgaagacagtgggcggcgggcgcggggaggcgagcgcgccgcgcggcaccaccgccactatcgacgccactggccgcatcagatgcctctcctcaatgatggtagggtgaggtgggggcgcatcgtcacagagaactccgaagccatcgtgccccgcttcggccagtcttcgctcgagctcggctggttccgtgagcaagcgagacggcacgactggcgctggcgacgcgccgagggactgggagctcaagtcagtgtgcggccgggccactaggagtctgacgcaggccccgcactgcctcagcacggccgcggcctgtctggcacacatgccgaccacgctgactgcgccgatgcgcagaagcatgtcccctgagcggagccggccatccctatccgccacgccgcccggcaggacactcttcacgagaacccccgaggaccttccaccaacgatgccgaacgccagcccggacccgtcgttcaccagctccaccacttccacttgggcgtattcaccgaacacctgcatgattcgtttttgtcgccgctcgctgtgttccctgcgcgcgcgacgcttttccgatcagctgactttctccgccattttgttttctcactgacagctctcacggaaacagccgaatgctcccgagcacctcccgaccggaaccatagacactacggtcgcgtcgcacattttataacgatacaaattcaaattttatttattgacgtatgtttctttttcacagcacttatgttctttcgtcttgccagccacttttatcccaccaagtcgaaaacaacaccagtaattttccaacacgacgcaaaaacacaaaaaataaattaaaaacacaacaaacaaggcaatttaatttgtccacacacaaaaacgggtaaactttaatttaaaaaggacgattttggctgaaattgtttggctgtttgagatggtttctttgccgcgaaaaaaacgcgtgcagctatgatggccgcc

SEQ ID NO: 1169 - DNA, 3449 bp, Plutella xylostella
cctgcctcctccagccgccggagcagcgcgccgcccccgcctcccgcgccgcccgcgccccgcacgcagactacgccggcggagagccacgagatgcgctgctcgagggtggcgccggaaccaggcctagtagccagtccctccagcacatcagcggcagcgaggtggtccccagacttctccagaaccttccacagcaggtccagtagatgcagcgcggtggcgggcggcgcaccgcgggccgccgcctgcaggtacgtgcggagagaggcgggtggcgccgttcctagggatactagctctgagccaagtcgtttggtgacgagccactcgtagactgccacgtgtagcagctcgtcgtcgcgggagaggcactcccacacaagcttccttccctgatagttggcctgagtgggcgacatggtgagcgcggactcggggcgcgcctcgccgccgccgctgctctgagcttcatagagacgctccaacgcgccgcacacctcgcggtagatctccattctcctgtagtatgcgagatgcccctcgcggtcctggctgggctggtcgctccggtagtagtgaatggccttgttctgagggtccagcttgttggcgcacgccacgcacaggtcaacgaccccggagaagaagccggctgctactagcttcgagcatactactggtagattcacgttcggtgctacgtccatgcatagtttcagggcgtgttggagcatttcatctcgttcagctggattcttttgctgttttgcgaatattaacagctcatttgccttagaacaagtggcgtcttcttgtctgtacagagtggggcacagctgtcgcagtttctgcgatatgccgtccactgaagcattgtcgcggagatatcccgccaccagagctccgagtagcagacaggccacttcttgaccaccgaccaacaactccctgaagccagctgcttgcaacgcgctctgctgttccggcggcaggttggcggcgatcacgtggaactggtgttccgacagaaccttccagaggcttaacatctctatcgccatattagtgaacacggtgagcgcgtgcagcgaggcgtgttcgtcggagtgcggcggcgcgagcgtgcgctgcatgaaggcggcggcgcggcgcaggcgctgcaccacgtgcgcgcagtcctcgcccgtcactgtgcttgacataaattccttattatccgacacagacttagacacgcatttcagattccatataggtgccaaaatccgtccaacataaatataaaggccattatgtttcgcgctgaactcgacttgaatagggccgttcggatctctttgctgctgagtcatatttccctggaacgagctctggttgaacggcgtgggactcatcatgttgggatggtagggggactgtccggcgtgcgactggttcggagagctcatgtatgactggttcatctgcccctgctggtactgctggctgagggtcaccggtccaagcggacctcgcatcgtcatgggcgtcgacatttgacgcggcgagaacttcggtgaaccaatagtgctagtcatctgcatagactcctgtggctggtaggcgggcgcgggctgcgagccgtgcagcaggaaggcgcgcgccgcccactcgcccagcggctccgcgcccgcctcctcgcatgccaagtacactgcgcacgcgcacgcttgctccacgttctgcagctggaagaagtccttgaccggctgcgcgtcaggtccgtggcagtctcggagcaacgaccgcagcaggtccggagcggcgcccgctgtcagcagcgccgcgcccgcgcccgtcaccaccgcccagcgggacacgctccatacttctctcttagccagcagcgcgggcgacagatgcgcagcgtgggcgggcggcagcggcgtcagagcccaggcgggcccgtccagcggcagcagcgagtgcgcctcggagaagcctgctccgggcagcgcgcgcgacaggcaccagagcgtctccgcctccgcgccgcccgatgagcataccatgaggagggtgccgttttcgtatactgcactatgtacttgtttcggttttagtacagaagcattaggcgtgaatcccggtggcaatcgcacgtgcagtaggttcaaatactgaggtctattcgatggccctcctggattcgcatctccgcttcctgtactaaaatacagtctggcccccgtctgagtcaccgctaccaggttcaggtgttccgactctgattcatccactgccgatattgctatcacaggtttgaaattattgccttctagtgtttttacaatatctacagctagtgatacaatcttcccttgagtcagtcgagcaacctttgtgagcccttccccgtcagagcccaaatcaaacacttcaatacaacctttttcagtcaaagtgtacaaaatgtggcgggagttgtccacttctattttcacaatggcatcctcatcatataaggcagcattcaggaaggcgggtactaggaatgataacgcacttgtggaatgatttacttttttacaatgcttcccaaaccagcctagttgtgccttataagtaatttcatagagacatccatctttaccacccataaagatgcgaccattgctggtggacttaactgacatcatgcagatgccgtcattgggcatcacaaacacaggttcaggcaccaggtgcatttcttcaaactcggtggagccatcaggcttgcttgatgaaaatgttacgccaagaaccacaatttcaactgtagtagtcaaaactaggagatacttgacaaagctttggaatactccagatcttggtttgacgaggcccacgctcacaattgtctctcccagtccgtcgaagtaggccacatcactgccatgctcaaatgcccagacatagatattgctgtctattgtaagccaaactctactgatttctggaaatactcccatgagacaatgacattgcatatgggcaaaatgttccattatttcaggaggcagtggaactttgttcacagttttcaactgtgataaattttgatgattcagaagggctgccaagttcttgtaatctcctgtgtttagtccactgcatgttggaactctttgagctgcaattcctgtgatctctaaaaacgaaggccttgaattatcagcacaaatataccggtccagagtgcatccagccgtttccaaacactctagctgcattttagtgccgtctactggaagaggcctctgtgcactgctaacaacactgggcatcttcttattattattttatccctaactattacttttataggttttaagcgttaaaatcaatttgaaatacgagtttagaaggccgccaaatgtaaattatttcaactacaacggaccgcagcatagccgcgtttcaaa

SEQ ID NO: 1170 - DNA, 2040 bp, Plutella xylostella
ggaacttgtaactcgtctttaaatcatctccctgctagtacccgagctgttacaatgtacatggataacggactcgtgtagcggggcctgggccagtagcacggggtgcaatttaagacgttacaaaagttctccgtcgcgctcgctcttaaagctacgcgatataagtgaccgcgatgcaaaacttttgtcacgtcttaattgcgccccgtgctagcccttcagtggccggccctcacgcctgccccatattgaacagcatcttcaagtcttcaatgctgagcttgctagcgccgttgtgccgcgcgcccgtcagcacgttctcggccacctgaagcttcatctcctgcagcttgcggatgctctgctcgactgtctccacgcacatgaacctgtatatgagcacgtgcttgcgctgccccacgcggtatattcggtcctgcgcctgctgctccagctgcgggttccagtgcgggtccagcagcagcaggtggttggcgccgcacaggttcagaccgacgccgcccgcgcagagggataggagcatcaccttgaccttcgaattggggtcattgagctgcgtgatgagcgcggtccgggcctggaccggcacgctgccgctcaaggtcacgctcttcacctgcagcttgtccagctcttgttccacgagacgaaggactgacgtccactgggagaccaccaccgctttgtcacctttattatcgaacaccctttcctgcaaggtcttcatgacggcctctatcttggagctgcgcctggtgagctggaacacggggttgccgggagacagcactgagcggatcgcctcagccgcggtggtgccctctaggttgaactcgggctccgtttcatcgtcggggatcttgtccttctgttcatccaacgtcagcttattcagctccttcaagaggtctactccggtgtcctcagggggtcccccggcgtcctccaggtcctccccgcccagcatggacgcgatgaggccgcagtggcagcacacctgccgcagccgcagtagcagcaccaggatctcgtgcgatttcacgggctttcctccctgtagagccaccatcttcttgtgcatgcggtcgtaggcggcgtggccgaagcccccgtccgcctgcttctccgctcgctgctgaaggaactgcgcgaacagcgtcttggagaacaccagcaccttctggtagacgttcatctcttggggctgcagcgtgaccgccacctgcacctcgtcgcgcgccggcaggcactgcagctggcccatagcctgcagttgttgcttgcagcggcgcagcatgacgcagcgcatgatggtggcgagccgctcctgcccgcccgcgctcttgttgtcgatccacttcttccacatcggcagttcatcaaacggcgtcagcttcagaaacttcaacaaggcaaacacatccaggtccttattctgcacgggggtgccggtgagcgcccagcgccgcgccccccgcagggtgcagacggccactgacgtcgccgacttgtggttgcggacgatgtgcgcctcgtccaggatgacgcgccgccagcgcatgcgcagtagcacgccgttcttctcattatccttctgcagtatattataagtcgtcaccaccatgtcgaacccggccaggcggctcggctgcgtgtgtctctgtgccccgtggtgcacgtgcaccgtcagcgcgtgcggcgccacgtggcgggccacctcgcccgcccactgctgcaggagtgatgcacagcataccacgagagtgcctccacggactgctttactgctccccttgcccttccaccggtcatcgtcttcctcgtcctcgtcatcttcatcatcatcgtccatggtctccttgtcggtgagcacgagtgcgatcatcgtgattgtcttgccgagacccatgtcgtccgccagtatgccgcccctaggcttctgctgctcccgccacgcgagccaggccagcgcgtgcgcctggtgcggcatgagcgtggcccggagcgggggcgggg

SEQ ID NO: 1171 - DNA, 3001 bp, Plutella xylostella
cccgcgccgcatggccccgccgcgggggccgattgatggggagaatgaggcgggtacgacgggcagcggcgcggcgtcgtccacgcgcagcgggctgccgggcgcggacgccgagtcgcgtggacgcttcgactctatcaccgccggctgtggaggtaacaagccatgttttcggttcctgtctctctcttctattattttcttctcttctgatttctgtcgatatttctgttcaatttcttcatcgtccaatagcaatgaaaccacttccttgggtttcaacgtgtctggtttgaagttgccaccgctgatcaccatcctttgtatctcgctcttctcccttgctcgctgtgtgatgcgctcctcgatagttccctggcagatgaggcggtagaccgtcacctgcttggtctgcccgagccggtgcgcccggtccatggcctgctggtccaccgtggggttccagtccgagtcgtagaatatcacagtatcggcggcggtgaggttgatgcccagtccaccggccctggtggacagcaggaacacgaagatgtcgtctcgagcctggaagtcggccaccatgtcacgacgagccgagatcttgctggagccgtctagacgcatgtatttgtgtttgcggtgccacatgtattcctccaacagatcaatcatcttggtcatctggctgtaaataagcacccggtgtccacgctccttcagtctcttcagaagcgagtccagaactgtaagtttacccgcgtcgctgactagctggttcttgtcgggcacctgcagacaggtccagccggcggggggtcgcgccgcgcgcgccaggcgggccagcatggcgctgcccgcggcacactccgcgtcctggtggcgtcgcacgtggtatgcgaagctccgggatacggcgaatggtaagcgaggtggggctattgccttaaccatagcagtgcagaagaagggcggcagcggcgcgggctgctcgctccgcgtcgctccctctcgctccgtgtgcgggaacacgtcgctccgaggcggcgccgggagcgagccgccctcctccgtctttattgaagttagcatctcgggctgttcactatctagttttttcgtgcgtatcgcgcgatgttctattgtctctggcatgtagtttattgtgtggtccagatgcgcgtagaatggaccaccttgaacccaattcggatcacagaacagcagatctttccaaagtatactatcttccttcctctgcatcagagtatcgccatcaggacacaccaacagcatgtgtttgctattcactctgtcatagtagctcgggtctagttctgtctcgctcgcactttcctgtttcacttccatagtgcgttgtttctgccaccagaggcgcctgtgtcgcagtctatcgtatttgtctaagcagtcttctatgtgttgcattgcaaaaagccacccgcacaccataaccctatacagctccatcggcgacagattcatgaacctcgtgaaactgaagcaccctgtatactccctatgaacatactctgtggccagaaccgacagcttgttatacaggatgtgtcgcttggacggtatggctcggatgaggatgcattcttcggcgattatcttcggtatgtggaagtcgtcaatatgcatcgcgaatggagattttacgtcgcgacgctcgaatagttctgggtgattgcataccttcctaaattgcataactaagttcatgagattcgacgtgaaggttttgtccacgctgtggccagattcacctccaactgacatattcaataagtcttctatctttatcttcttctttagagcaatatacaacagcttctgccgaatggtgagcggacagtgcaccattatttcaatcttgtccgatagttcgttctccacgtctttctttattcttctcaacatgaacggtttcaatatcatgtgcaagcgagacagatgcttctcatcaatagtgctcttgttctccgcgtggctctcgatgtccttcgagaaccactcgttgaattcctcgtgagagtcgaacagcgtcggcattatgaagtggagaagcgcccagagctccgccatactgttttgtatgggcgttcctgacaacaacagtcgattcctacagctaaaccccaacagcagtttccatcgcatactagccgaacttttgatagcttgagcttcatccaatatcatatactgccacgacactcggttcaggtacttgagatctgacacgacgatctgatacgacgtgatgacgacgtggaaggctgcgttttgcgtgtgcaagtctttgcgttcccagaactgacggaggatcttgcgttcggaggggctaccccagtatggcaccactcggaactggggcacgaatcgcttgcactcctgctgccagttgtgcagcgtcgaggcgggcgacaccaccaggaagggcccccacacgcccagccgctccgccgcgtggcacaggaacgctatgcactgcaccgtcttgccgaggcccatctcgtccgctaggatgccgcttatgccctgatcatacaaactagccagccaattcatgcccttcagctggtagcccttcaaggtgccctggaagagactgggctggtcgaagtccccgttagccccgcctatattcgtcgcgcccgccgccgcgtccagttgttgggtcctctgtctgtcggctctgaaggcttcgcgggcgttgcgagatgctagggctttcatctcttggctgtcatactggtcaatattggccaatctcgggtccacatcctcatccaactgactcagtatctgctcggcacagttgtcgccatctcccgcgcctcccgtgttcagtttacgctgcataaagtgggcgtatagctccgtctgggttatgaggaagtttagcttgcgacgttgccgcttcgcttccattagctctacgtccatctttctctgctccacagcctctttctcc

SEQ ID NO: 1172 - DNA, 686 bp, Plutella xylostella
aatcctcacaaacattctttgactgactaagaagtctcaaacagagcaatatcaacagctaggccgttagggttcagtattggttggtcacaggtactggcaggatcgcttcatgactggcttcttgcgcaggccggcgcgcacggcctcctcgaacacctcgttgaggttcaccctctccagcgcagaacattccactagcgctgctgccctaattttcttttttaacttctttccttcctgcgtggtgatggtctgtgtgggtgacgtcgtccgcaggtcaatttttgtagcaactaagactataggcacggctccgctgaagtgtttcagttcggggtaccacttgagcaccacgttgtcatatgacgcgcggttccccaccgagtagcagactaggaagcagtttgtgtgtgtgtacgacagagggcgcaaccgctcgtagtcctcctgtccggccgtgtcccacagcgccatctccacctcctcgccgtccaccgtgatgtggcccacgtagttgtcgaacacagtgggcacatattccttgggaaagatgtcttgcgtgtagacatagagcaggcaggtcttgcccaccatgccatcgcccaccactgttatcttgagccgcgccgtcgtccccatggcgaggcagtcacatccgcacacactatcacagcactgttact

SEQ ID NO: 1173 - DNA, 2586 bp, Plutella xylostella
atttcacaagattcaatcattaaaataagaaggtataatcaaagtgtatcaaaatcttaaagctataaacgaaggtacttacatgattaaaacaaaaacagattcacttactaggcgaggtttggtattacaccaatatttcagtttgtacttgatccggtgttaaaatattaatactcaagagttaagccaacccctgcaattaaatccactcgaccttgatatttcttcatcatcgtcattttgccgtggtttaatacctcggtaaaacaactctactaggccatcctatacaacatcttcctttgcaagcgatgttgcagttcccccctgcggatcatggtgtgaatgaccttctgtatggctcgctcggggtacttctgcttgaggaagtcctggatgatggtctgctcggacacctgcgagccgactgcgaaccgccgcttcagctgcttctctatgcgcgtcagcatctcgtggtcttcctcgctggtgaagccttccgctccggcgagactgccggtcatggcggcgtcgagcgtggacacctggaacaggcgcagcgcctccgtcacgtggctctccgtcgcgaacggctgcagctgcatcttggcgagagactccgagatgcgcacgatcgcttccagttgtctcacagtaataggaatagacagccgcttatccgcctgccgctcgtgctgcgaggcgccggtgcgcatgagcacgtaccgcgcgcgcaggcgctcccccgccgtgtccgacaggcgcgggccgcagcgcgcgcggcagtaggccacgtagcgccggagtgtggccagcgggatctcgcccgccgccgcctcgcgctccgtgctgtcgccgcccatgtgcacggagattatgtgcttggctagcgtaatatccctattctggtcatgctcatccttcacaatgaagatcatgtcgaaccgggacaggatggtgggcatgaagtcgatgttgtcgtcggccttggtgtcgtcccagcgcccgaacaccgagttggcggccgccagcaccgagcagcgcgagttcagcgtcgtggttatgccagccttggcgatggagatggtctgctgctccatggcctcgtggatggccacgcggtcgtcctcgcgcatcttgtcgaactcgtcgatgcacaccacgccgccgtccgccagcaccatcgcgccgccctccatcacgaagttgcgactggcggggtctctgatgacggaggcagtgagaccggcagcgctggatcctttacccgaggtgtacactcctataggagacaccttctccacaaacttgagcagctgtgacttggcggtcccggggtcgccgaggagcaggatgttgatgtcgccacgacgcgtcagcccgtccggcaggcgcttgcgggaacctccaaacaacagcgcagctatcgccttcttcatatcctcggctccgtacacactgggcgctatggacttggcgatcctctcatacacgtcaggagccgccgcgagcctccgaaactgctcctcctcctcgctggtgaagggcttggagccgcccgtcatgccctcctcggcggtgagacccaccgcgcgcaggtacgacgagcgcacgcccacggaacccttgtcgcgaccttcgcgcccaatcttggcgatcttcttgatgctgtagatgccgagcacgagcacccgggcgccgggggcggctcgctcgcacagcacgcgctcgcagtacaccgtgaggtgccgcggcatctcgccctgtgggatgctctcaggcgcctcttggagcttcaacacctgataatctatgcatttgcacttgtctggtatgatgaagtaggggtccagaggacacttggggcgaccagcttgttccgtgttgcatttccgtggcataacgtagccctcgaggccgggcttgacgggcaggttggggatgatgttgcggcatgatcggcactggatggagatcttggtagccttcgccttgatgcccgatgctgatatcactataccgggtatctttactagccgggatactgtctccgatttcagctctctaagattagaaggatgagcatcagaagacagtagaacttgtatgtcttcaactttctcctctccttctggtcttggtgcagttaattcatcagctaactctttagccgcttcttctagtataggcaaatgttcagtgagtttcttgtaaagtttctcagctaagacctcatcaaagcttgacaaatcttcaatatttagctccagccaatattgtcctaaattataattccgtttcagtgcatctctgtatttgtagttaaagtttcccgtatggaactgtcgaataaattctttaaactttttcttcacagcttgtaggttaatctgatcttgggattcattttcttcgacaccaaaattatcggaaaagaaaacaccggggtcatcaaatccttccattataggttgataatatcttgtatcacacaaaaattgtaatgtatttgtagacagaaataacaaatttaacaaaaacaagcttagaggctttgcttcgtttgctttgcttcgttttcgc

SEQ ID NO: 1174 - DNA, 2875 bp, Plutella xylostella
tcaataattatataagttgtgacatttataacatggtaggtacaaattcgtttacaaaacatggcatagaaaagtactcgagtaatttaattgtaggtacaggcaagattacaaaaattacttatccgtttttttttgtctccattaaacagactagttttttacctcatcgcatccatcataagttcacataatttagtaaaaacattactacaaactgtataaagttaacgtgacgatgagaattttacagaatagaataaattttacatgcaaaaatatcgctgtacgtatttttgttttagctttacgtgtctacccatgttatatgtaataacttgattatgttttaagtatgtaggtattaccaccacaatggttacaatcccactcttagatactttctgtttaacacagagtctgttttcatcaaactaaaaacatcgtcatatatcgaaataaaacgcatttctctttatagaaactttcaacaccaacaatcacaatttccatcatagtaatatagttttagctttagtaaaaaacaaattattacaatggatttctttcattcctatcggcctcaattgtaacactgtgttctcaaaaatgattaacttgacttcttacacactcaaggctgaaacgatacacaagtggaaaagttttctacaaaaatgttgcacaaacaagtaagaatactggctatcatttccttcccaataaatatttttctataattcacattaataacttcactgtttcatcacccggtagtgcagtgtgaactcgacgttcgacttccagatgaagtgacgtactgtacgtaggtccatattcgggtcaagcacctggtccatacacagcagctgcaccttttcgtcctgcgcgattgcagtatccccgttgctcttgttgccgccgggggccgccatgtcgccggcgcccaggatcttctccaccacgtgttcggcgactttgcggcattggatgaaatcgttcgctactaggcggtccttcttctgtcgatcctgcttgctctggcagctggcgtgcgacagcaggtagaatggcagcttgttgagagagggcgccaccatctctatggccacgtccacgacccacgaggggaccgtctcgctgagcaggttgccctccgtctctccgcctgcgtctcctacctgtagtctgtatagtgttctgccaccaacctcactgaagatcaatggagtatgcagcggtacactgaaatagttattaccaataactttttgtcccgattcattaactctgttaggatggttccaatgttctagcaaagcttgcagaagtaacgcgccaaagttgactttctggtcattctctgtggtcaagccagcctctttagcactcacccacgcactcaagcagtcagtttcatcttgccctaaatggattgtcaacataccagttttcaagtcaacattgaaccaatttggcacaaaaaccattttgaaccgtttcttcacttcttcatcaaagtcaacttctccgagttcttccactcggcttgctttcaacacgtcatatactgctacgttgctcactgtgtcttttgttaaaatatggcgtttgtcatttaggaccacatattgtttgatggctggtccacctggaatgttatagactggtgcggtttgataaacgttgttagtattgtaagagttttggttatacgtttctgagtttaaggagtttagcggaggcagtttccaactccgaatgtcagattctgaggtggacacccagactccttgctggtcagctgtgaaacataacttgaggattggggccgtttcttcacagactatcatgaagttgtcagggtttcgtagttctgttatgatgaccagtttatctctgccaccggaaattatgtgtgtgaagttttctgtggctagtaacgcccagactgcttcggaatgtactctaatagttgagacgcacctctgttgtgacaatgaccacagtttgatagttccatctgaacttccagacacgcactgtgacccatctcggctcactaccagtgctttcacattatctgcatgtccttttaacttcataagcctggagcagttcctcgggtcccaaactctcaaaactttttctgtagaaccactcactaatattgtcccgggcgggttcatggcgagactgtatatagattccttattaccgacgagactagatgtagtgactgtgttgttgctggctgtcaatgctgttaaggtgttcacatcccacaagaatatggcgcgatctaaaccagcactcgccacttgctccttgtctttcgcgtatgctagtgtcctgacatagtccttgtgagtgcgcagtgtggacatgcagaagcctttatgcgcgttccacactttaacagtcgtgtctgatgaagcgctaataagattcttcccgccgcagcacagcactatatcgttgacccagtcggtgtggtgttccatgctctggatgtacctgtcctgtaccccggcccccgtctgccacacacgtatgatcccatcccggccggccgaatacaatctgccctggagaggatccagttgcaacgaactaacaccattcttgtgacgcctctcctcctcgtcacggatcacgaacgacacctgagttttcttacgcatggttgaggacattttccggcatttttgaacgtgaagttaaacgtagttgtcgtaaactaaagcaaaacaagtttttggaacttcgtccatttgtgtgtttcgcaaaatttgacagttcgacatggatttttgtgacgtttgtggattgagtatgttttttatgtacgcctccaaaaataagctctctgatt

SEQ ID NO: 1175 - DNA, 2900 bp, Plutella xylostella
ggattccttaaatatttattatttacatcaatataaattacattaaaacaattacaatgatatttcattgagtttcggcacaataatctattcaggtcaagctagacctaaatattgttttcaaactgaatttacaaaactcttatttgtgtatttttaacttggagaaatattgtttgaccactaagaactgatattcttcaaactgctgcgcatgggccttggtcagtgttgtgtgaaggtctttgaggattccttggttaggtataggcctcacgggacttcacaccactctgccctcggcctttctcttcctggcactgcactgtctgtcctggtctccactcgtgaaaacgttcctcagtttattattttttggcagatacaaaagacacttcttacaatttttatcacctcatttctgataggcttcatcagagaaaccccttaactgtactgtttaacattggtttccttcctcacaacctcagaacgcaaccattaccttttccacacaattcaagatacacacaagctagtccccttagaaaccagtgacagctttgatggccttctcttcgtcgtagggcgtcatttgcctgttggagtggaactccatggtgaaggaagcgagccccgagctgagggaccgcagcgccgacgagtagccaagcagctctgatagcggtgctaagcactctatcaccttgtctcctctccgcacgtgcacctgctgtaggtcggcgcggcgccgcgtgaggtcggccagcacgcgcgccgagtgcgactccggcaccaccacttcgagagacatcaccggctccaggagtatggactcggcctccgcgaatacctttcgaagacattgcacgacggcggcagagacaacagagtctgaagtcccgcgtccaacttccagccagtgaagagtcacctgcacatccaccatcttgcagcctagtttgggtccgtgcagcagggccgtggagacgccttgctttacggctgtcatgtgtcgcgtccatacatgcgcgagatttgccgcactctccggtgatttgttcaacctcaaaaccttatccgccggtactcctttaaccgttttggctgacatggtgacattgaccatctgcttctggctgccgatcttccgctccagcacgaagttcctctgggcggcgcccagcagcgtctcccggtacgctatctggagaggacccagctccacgtcgatcttgtactctctgattatacgctctttgattatctctaggtgcagctcgcccataccagctagtacgatctgtccagactcgtcatcgttgacaaccctgaggctggggtcctctcgactcagctcggccagggctgtctccagcggggtctggaacgccacgctcgggggctcgatggtgcacaggaacacgggctccgggacgcgcgcgccaatgccgaggagtatatcagccttctcactgtcgtctggctgctcgtccaaagcgttcagtctttgtctggcactcggcaggatcagacgttccaggtcctctggtttgctcagccgggcggtgagtctggtcttagccttgttggcagcagtctgattagaagtgactaagtcccctgtcattgttaccttgagtccactaacaaccgcaatgttaccggcagtcaccttctctacaggcttatactcatcagctaaagctacgtacaatattcccgtctgttcactttgatcttgaccaaggttataaattttttgccctttgcttatttcgccactgtaaagtcttaggaacgtcaacacccctctttggtcgtcgtgttggactttgaacgctctggctgatagatctttgtcaaaacatctgtaaagctcgttacattggtctggcgaaggaaggtagtctacgacagcgtccataagagtttgtacaccaatatttttgtaagatgacccgcacacgatcgggaaacctttcatatcgatagtgcagcggcgtatagctgcagttatgtctttactttgtatattgtctaaggattcctcctgtatgatgatgtctgccagattatcgtctatacttgaaagtgtgtccacaaggtgtctgtgtccagtcatagtgttttcccagacatggccatcctccttctctgtaagttttcgtcgcgtatatttttgaccccgcccctgcgtccagattatttcctccaagttcaacaagtcaagtagacctattaactttccttcatgtctaacaggtgtatgtagaagcaatggtgttgcgtccagtttttcctctattgatttgacacaagctacttcgtctgcatcagatcggtccattttgttcaggtacaacagacgaggcactctgtatccagctgcctgtcgccagactgtcagtgtttgagcttcaacaccagccgaagcatcaagcaccacgaccgcaccatctagcacggcgaggctctgctccacctccatggtgaagtcgatgtggccgggcgtgtccaccaggttgatctgactgctgccccacgggaaggacaccgccgccgaagtgatggtgatgccgcgctggcgctcctgctccatgtagtcggtgacggtgttgccgtggtgcacctcgcccatggaccggatggtgcccgagtagaacagcatccgctccgtagttgttgtcttgcctgcatctatgtgtgcaaggattcctatgtttcgtatattgtcgctgttatatttctcgcgaaggtttgatgtagtgctgaacctacgcaactgtgcattcctgacgagttttctgtaatggtttagggaacagaaagctttcattataaaattttccgatttgtttttcccgaataaaatgaaaattttgagccgcacagctgac

SEQ ID NO: 1176 - DNA, 1516 bp, Plutella xylostella
tctattgaaaacctggtggaatgcttacaaaatacgtagccagtagccagaccaatatatacgcatttactcttaaacaaaccgtatgcctgctatttaaactacaggggaacaaacctaagaatattttacagttgtgcatgcaatttccgatattagtatagtatgataacatagatttcttttagtgatatcaaatatttagtttcttagatttgtgactctgcacaattcttactttgggttaatgttgagagatcgtttaaaaccgtacaatttttaaagtgaactccctttcattgtaacaattgcgagcaatatactgcaggatttaacaatttatgtacattgaacaccgtcagtaactactacgaattacgaacatttaaatttgcatacgcttataatttgtattacatatagggcttagagaccataatatgatgaatttaggtgtaacaataattattccttccgactgcatataaccttacagaaacacaagacttcacctagtcggtaaatctgtattttcggtttagttagtttagaattttagccagaagttaagtatatattattcggagcttctacaaccacccttgttatactataacagtgtatctactcgcagctaggtaggcaaaagtaacggtttactgcacacagtctagaacagcaggtcttcgtccccctcgtcgagtaaattggccgagtcacgcaggtccgtgccctgggcgcgcttctctttctttatcgcctcagccttgtccttgatgatcttcttcttgtcctggatcttcttgaggcggtagaactcctcgcgctccacctcgtccagctccgagatgatgtactgcagcgtgcgctccaggcgggggattatcacatgctcaatagcgttcacacgcctgttagtgatcttgatcacttcatccagcgtcacaaacgaggtctgcagcgaagccagctccacaagcagcttgaccgcactctggaagttcttcttgagcttagccagctgttgtccaccgcgagccagaccggccagctcgtacgtgtccgtgccgtccgtgtacgactcgaatattggcagggtcacaccagcaacattgtctttcttggagcggatcttgatctgtgctttcgtgacgttctgcaggaccacttggttgaagtctccggtggtgaacttggcttcagcaagggagaatgcggcctccttcatcacttctcccatcagagtcttagtctcgataattttgccgagaatcatacggaacctcacttgcaaggcatcagccttcttcttgaggagaccatggcccttctgcgcaccagccaggcgggcttttatcaacatctgagcaccccgagacgggaaaatcgctaatctatctttccccgacatggtgaactatataattttaggcgattttactatttttcgaggattttgctcacgatcacctgatgacagaagacaaatggatgatacagaaaattgtctatggtt

SEQ ID NO: 1177 - DNA, 1125 bp, Plutella xylostella
ggctacctttattctatgaatttacacattagtttgcagttataacaaaatagttcagatataaccttatataaattataaaataatgttacagtataagccttgtaaaaaatatagaaaaggaatgagtttgtagcccttctttccttcggaacaccttgcggtgaatgaagtatcgcagttgtatgaaaaattgtgctgttaacagcgctagctacttcttgcccttggtggccttctcagcggctttggtgaccttaccaccaccagcttccttgaagttgacagccttgattacacccacagcgaccgtctgcctcatgtcacgcacggcgaaacgaccgaggggagggaattcctggaaggactcaacacagagaggcttggagggaaccaagttgacgatggcagcatctccggatttgatggacttggggttgtcctcagtagatttaccagtacgacggtcaaccttttctttgatttcagcgaacttgcaggcaatgtgggctgtgtggcaatccagcacaggtgtgtatccgtttgagatttgaccagggtggttgagcacgatgacctgtgctgtgaagtcggcggcgcccttgggtgggttgttcttggagtcaccagctacgtaaccacgacgcaactccttgacggagacgttctttacgttgaaaccaacgttgtcaccgggtacggcctcttggagagcttcgtggtgcatctccacagacttgacttcagtggtgatgttggcgggggcgaagacgacgatggtaccaggcttgaggataccagtttcaactctgcctacgggcaccgtaccaataccaccgattttgtatacgtcctggaggggaagacgcaggggcttgtctgtggggcgagcagggggcaggatggcgtcgagggcctcaatgaggcatttaccttcagccttgccttccttgcgctcaacgttccatcccttgaaccagggcattttggttgacgcctccaacatgttgtctccgtgccagccagaaatggggacgaaagcgacagcagctgggttgtaaccgatcttcttgatgtaggaggacacttccttcttgatttcctcgaaacgggattcgctgtatg

SEQ ID NO: 1178 - DNA, 8125 bp, Plutella xylostella
gtaatagagaataagaatttacataatgtataaaaataggacttgagtcctattaggactcagaaatgcatgtagaacgagaaatgaatgtacaaataaaacactccctatccactgctaaaatgcaatgacaatgtttatgtgcccttattaccaaagctttacacaattttctggttttagaaattgcacatgattttgaaatatttataattataatatgcaaacctactaacgatcgctaaattttgtacatttactatgaactatatcacttgcgtatctgtctaattaaattccaagaatatgtgatgaagaatcgaataaatacaaaaataacattacgattacaaaatagtatttaaaccggaaaattggcaacaaaatgatacattaaaattattgttattcgtctacaagtctgtacactaatcagcagaatagcaataaataaattcactatacagtctctcacttataaaacagtcatttcattatatctacatgcttccctgaatacacgatgcgcttcgcttatcacacagataaaaaccacagcacaatttgtcacttatcctttacagagatcgctacagctaagtatgtacaaaaatatttacagttttaacgagtgggttgagtttaggtgggcggcgctcggcggtcgtagtcgcggcggtagacggtgtcgcggtcgtagtcgcgctcgtcgtaggggtagtcggccggggggtagccccgccagtcgtccgggtaggagcgcacgggcgggaagcccatgctgctgggcatggccgcgctgtcgtagtagccgccgtacgggttcgcgcccatgccgctgtaactgccgtacctgctcctcttgtcgtgtggtctcgggttgcggtcggtgcggtactggcgcgggccggggtaggcgggcggccaggctgcgtgcgcgccgtgctcgccgtgctgcgcaggcgggtagggggggcgcacgcgcggggcgccaccgctgtcacgccgcgtgcgcgagcgctcccgctctcggtcccggtcgcgctcccggtcccggtcccgctcgcggtctcgctcccggtcccgctctcgatcccgctcccgctccggccggctccggtctctctcgtgtcgtttgctatcgccaggatcagggtcacattccccttcctctagttttctcttgatgccggaggtgtgtggcgttttatcgctagacttgtctctgtctacctttggccgcttttctttcttttcattattttcttctactttggtttcttttttcagtgatctaacattattatttgcattatggttgttcttattatttttgttgttagtctttttattttctttatgcttgcctctagatgcctcttcatttttcttcagtccatatttatatagcctgtacagctgtttggcatcaaagtttgtgaatttcgacacaaaataccagagattacttctccattccaccttcttctcggcgtcagggtaggcgtccagacagatgtctatttggctgccgatctgcgtgagacaggtcctcgtcctcgtcacctgatcgtgctctgatagtgtttgatcaggattatccaacgcgcgtaaagcttttttaacaggcctcattttttctttgcactcttcaaacacagaagggtcaaggtcccctagaacctccagtgccctaggttcgttgttggcagtgaaatgcatgggtccagcgtttttcttgcgcccttttgctttgtcatttttggaccgatctttgccatcctttcttgtgcgtttcttgtctttcgcctttacgtcttgggatgtttcatcatgagttgaaaagtcttctaatttcgatttattcttactatcatttttattggcagtcttattagatttcttattctcctcccctgaactaatatcatcttcaacgatgtccttagtaacaggttctttcgctcccctcttcattctcggctttctttgtttttgcttgccattcttttgatctaacaatttcttaattaattttaacaggtactctgatcttgactgtaaatgcttagcttggggtttcttgtcctcattggtaagtattttatcgcctatttcgaaggaggagtccatctttatggcctcccaggaacccatgccgtactgataaatgcctgcaagtagtttggagtcatctgctacagtccattcaatatcgaagttagctggtcgcgttctgaaatccagttgccattttagccgttcttcctttgtttgtggcaagaagtcgtcgagcggagctagctcgtcctggcacgccgccagcgtcttcgcgttcacgggcacgccgcccagcttgaatgtcttacgagcattcttccgcccatcactaggctccgcggtttcattggtgctattcaacacttgtttacatctttcctgtaaagtctctcccaatttcttgagttcagcgagtggtttctcctgcagctccgcgtcacacgcaatgctgtccaggtgcttcaaaggagcggaaaacttcttgtagctcttgacaaacctccggatctcttgatcagtgaaccccttgatcttctcccggtgcgaggcgggcgggcggccgcgcttccggggccggtcgtcgtcggcgctggcgtccccctccgaggcgtagctgtcgtcgccgtcgtcgccgttgtcgccgtccgcgttgtcgcccgacgtgcggctgtgccggccgccgcgacctttagaatcagcgttattctgctgcaaattctttcttctaggaggcaggtacaaatcttccatttctttattcttctcttcctcagcaattgttttccgcacattttcgggaatgatgtcgtcccagtctttgctttcttcttcgttgttttctttcttgacctccatgactgctttatcctcatcaaaggcgaagctggcaactttgaaggccgacagcagttcgtccccggccatcgtgggaccctcatcccgtgtctcggctcgttggaggatttcatcaatgtcacaaactggttcttcatcattttcatcatcatccttgaacagttcctcggcgccaaacttgagtatggcgttcaagtcttccttgttgaaggggttgttggcggtggtggcggccgtgcccccgtcccgcttgttgagcaccgtgcgtcctgtggtgtccatgcgctggatcaccaagtggtctagaaccatcttccgcttcgctcgttccactatgtcctcttccaccgacctggctgtgactagccgataaatgttcacctgatttttctgtccaatacggtgagctcgcgcctgagcttggaggtcattttggggattccagtctgaatcgaaaattatcacagtgtctgcggtggctaaattgattcctagaccacccgctctggtcgacagaagaaaacagaagtcggttgatccttctgcattgaagtgatcaagggcttgttttctgatttctccctttatgcttccatccagacgttggaacgggaagtgtcgtctttgcaggtattccgctagaatgtctaacatcctgaccatctgagagaaaataaggaccctgtgccctgtttctctcaacctgcagagtagtttatcgaggagcagcaactttcctgagcctctcagtagtttttcaactgcatcagtggtcgctagcgacgctctggtttcgtagtcctctggctttgtcaacagtgcatgattgcagcacttcttcagctctatcacaatgtttataaaggtattgatcgaccctttaactcctttcctcaaggcactgtaattctttgtaagaatccacttgtagtattgcttttgaatggaagtcatttctactctgagaatttgctcaaccttggcaggtaaggacttttccacatctttcttctgtcttctcagaatgaaaggctcgagttgtttgtgcaacttttcgtagcctttggtcgccgcatcttcatggtctttttcaaactcttcccacgtttcaaatttgtaaggcataatgaagtgtaataatgcccataattccttcagtgagttttgtaacggagtgcccgtgactaatagtcgatgattggtatcaaattccttcagtgctttgtacaacagagaatcatcattttttagtctatgggcctcgtcaacaagtaaaaccgcccagctgaatgatcttagaaactgtctgtctttcagcaagatctcatatgtagtcaatatcgcattgaactttagtctctttgaactggcaaaactccattcaaattggcgaagaatatctctgctgccgacatcgccgatgtatgtgacgacattcatatcaggcgcccattgcacgaactcgcgttgccacgcagtcatagtactcaacgggacgacacaaagaaatgggccatacagcgattgagatttaaaaaggtagtataaaaaacaaatcgtctgtatagtttttcctaaacccatttcatcggccaatatacagttgcgattgttatgccacgagaacaacaaccagttcaatccttccagttggtatggtctaagcgtgttgccacctttataaagtggagactcttttagttgtacccaattatctgcagatgggcgcttcttgtatttccatttatctttaggtggtatttcgctaaatatcttgaactgttgaattttctccacatcgacatcctcttctagttcccatgtactatcttcatactgtaaacttttccatttaaccaagtagtgtttaacaacagtattgttagcggaatctagattttcggagacatccaatattctttctacttccacatagtctggattaaatggttcatcatctaacatttcgaaaatattcatctgttgtgcttgtttttgtttaaaacgctttatttttgaaaatatacgtttatcacctttatacaattcttcttctgtcttccattcacaatgtaaataagaaaagttgcggtacttcacataaaattcttcaacatcaataataatagttttttcattttcatcttttactttactagcctctgctgccttttcctcaactttgacttcagcaggagtatcggtattttcagtaggttcttctttttcgagttttggttcgtctttaatctctgcgcttgtcttatcagcatcagtaggtatgttaggatcagtgggtattttagtatccgtgggtatgtcaggatcagttggtattttaggatcagtgggttgaacactatccttggtttctacagcagatttgtctccttcattttcttccagtggcttcagttctttttcaccatcaggctcaccatccggttcaggtttgactgccacgggcggatttaagcttgattccttaacctcccgcttgcccattctacatgctaagacatgctgtacgatcatttgatcttcatcagttatattaacatagacgtaatttggtttcggggtcccgtcaacgttatctttaacttccttacgcatttcttcaggtttggaatccttgtctccacgtcttggtgttgatattccagaatattcctcatctgataatcgtatcattacatcatcagtgtattttttacgctgagtatttctagcagagcgacgttttaaactatcatcttcaacgggtggtgaaggtgggggtgttgacatcatgtcatcaggctcaccatctgaatcaggtacaataccaccacgcctttttcttttacctataacaacctttttattagcagccgcctttctcgcgctcccacctgcagaacctcttttcttagtagctttctttttatatgactgatttaaagaatcagtatcgtcatcttccatttcccgtttagcttcagcttcttctagtaaatcttttatagctattttagaaacaggaatatcatcaaagtctgttacagtgttgtctagatttgtatcagagtgtgtttgagaattattagcagaatccatagttgtttcagttggtttcatttcagaagaggtatctttatcaatatcataattagtagtggtatccgcctggaattcaccatctttcttagaatttctttttcgttttggtgcattgggatcttttggctctcgcttttttcgttccttgacgggcttatcacccagttcttttggtactttcggttctttaggtgtacgcggttttcgttctttcttaggtcctcgttttttacctttttcacttaaactttcatctattgaaagcatactactatctaaattggtaagatcttcactagggtctacatccatttcagaattatttagaatgcccgtacctgcagtgacacagtcttctgacacaggcaactgatcaagagccgctattgcaggaattgccgtaggtttttcttttttagctcttggttttcttggtcgagcgggacctttccctcgtcctctgccagtggtacttgtaacctgtggactttcaaccattttagctccataagcaggattttgtaacatacaatttggacctccattgcatttatcattggtttcatgttgctgtaataacgccaatctttcctgaagacatcttactttttcctgattttcgggagaagggggtaaacaatatatctcttgtatttgctgctgtaaggatgcccgttcttggtgatgtagaggcgaatacataggtggcattgcaccatgaggaatattaggattcatcaccatgcccatatttggatttatattatgcggcatattaggcatcagattcgtttgattaccttgcatgttaggtggcaaattgggatgcatatttggtacccccattggcattcccattggtacattctgagaagtatttggtggcatgttaggaatattttgttgcattgtaggcaagcaaggaacatttggagaagggttgtgacccgggatagtagtttgaataccaacatgaggtaaagactgtacaggcgcattaaggttgttcagtgcaaggtttggtggtacagctggctgcagtgtagtcagactttgaggtggtactggacttctggggtgagagttctgaaatttcgtttgtagggattgtgatgaaggcggcatattgggaggcagactgcccggcgcactgggcgaatttagttgttgattcatatttggtataggattacttgggtatggtgaatttcgattcattatttgtgggcccccatctgctggtgcaggcatcgaaacaggcatgttatgtggacttggcacatttattggttgcgacgcacttaattgaggattaatgttactattatttgtaggaggaacattagctaaagtagctggtatattagttggacttaatatttgttccttattacgcacatccacttgattttccggaggatattgatctgttcctggtttttgttcacttgcagtactttcacctgatgtttcagtatcatcaattgttttactatctaatttgttcatgatactatctccgtcaggtttgtcattttctcccactgtggatttggtgtgagattctaagtagtctattgtggaatttgtgttctgatttgttgacattcctacatcggctggtgtattagttgattctttattcgagccactgtcagttagtgaggcgtactgccgggaactgtcgccattgccctcctgggagattggtggtgctgctgctggtgcaggtctctcattttcaactaaattcttttccaaagtcatattttctgagactgtcccacttttaggtttaatcaaagtaggatctggactcaatgtcgtcagaataggcgactcacattttttccccataatatcactgttatccaactgggccacattacttattggcgtcggaactttattttgattccactgaggaacagcacccaagtgactcatcgcaggagacgaaggattacgttgataggggtattcagatccggcaggtagaaccatttgttctaaagcctgcaatgtgttttgtgatgcaaacgaagtgttggtggtcgccgagggcgcggaggagggcgggtgcggcggcggcgggcgcggcgcgtgc

SEQ ID NO: 1179 - DNA, 838 bp, Plutella xylostella
ggctgtcttgggtagatggttgcacgacggcggggtagacgaagccggacgggatgaacccctcctggccgtcgctgcgcacgatccagtaccagtccgggtcttctcggttcagcacagtgacaaactcgccgcgctccacgtccacgtcgttctcgtcgcgcgcggtgaaggtgtagagcacgacgtagcggcccgacgggtccttgctgaagggacacgcctcgccctcgctgcctagctccgaatggccgtcgtttgtcgcgccgtctgacactgatagctgagaaacatctctatgagctaggtcagtgggagatctacttcttggtagttttttcttcaagtcatgatgctcgcacggagcacaaaatgagtgaggaatgaacccctctctccgggagtctgcgagtatcacatacacccagtcattctctctatacaacacattcactatttggcctcttttcacctccaattcatcatccacacacggagcaaagtcatgtagaactaccatcttggagtccggactcaatccatgctctttctctataccaactcgaactaaagtttctatactagctgagccagtgatacggcccatacccggacttaaccctgaatccggtctggagagatctttgtctgaatcaccactgcttgatttcttcttcttgccccttctgattctgacagggcaaaggaatgccatattgtcgaatacttctagaacagcattactggttcaatgtatcttgttttatgtttcttcttcaataaaaaacttttcacacgatacaagatttctttacatcttcaacttcaagcattcaac

SEQ ID NO: 1180 - DNA, 1559 bp, Plutella xylostella
gggggcgggcgggcggcggcggcgcgatgcccgtgttgatgcccattatccgctgcatgttgaagttgcggcccacctgccctctactagccatttctcttaacattctctgttgtcttatcgtgatctgcgcctcccacacgtcgttttgtatacttgatagtccttgagctccaaccacggccacgttgttgttgccggcgggccccacgggcgcggcggcggcgggcgcggtggccccctgcgccgacggctcggtgcgtgacgtcaccggctcgccttcttgctcctggctcgaactttctgatgttgagctggtgtcatgtgtctctcgtgggctatgcctggtggcgcggacggggcggcggcgcggggcggcgcggcggcgggggcggcgcgcgggaggggaacagtcgcgcgtgctcttgtctgagacaccctcgtctggttggatgtcgtggatgcatgaccactctgagcggtcgtcgtggctgatgttcctgctgagcgccgtccagccctgcgggtggatctgcaaagcgctaacgacctccgcgtcgttaacctctgggaagtcggaaacaaactccactcggttctcctttctattcctatcgaacaggtgttcgtacatcgcggctatggggatcagctggcgggacatctgcatcagcctgtataagtttggcttaaatccatgcaagtcctgtgccagtgtcgccaagttgagatcatgtataataacgagcagtccgcccgtggtgcacatcaccatctgccgagcgtctggagtgagccggcaccgcatcagaccagacgcatgaaacactctttggtacaccagattatactccgtataactatttatatcccacgtgtatatactgccatccagtcctgatgtgacaaggagtttgtctttgtgtgagaactctatgtttttaacccaatgtgaatggccggcgagagaccttattttcttttttaagtttcttacatcccacagagctatggtggtgtcgtcagagcaagtcgcgaacatgcgcccgtcaaggaatttgacacagttgacacagtctgagtgggccccattcactgagtagatcctctgatgagtcaacggatcaaatatttgtatggacttcttctcacaggctgccaccaacaggtttccttccggtgaaaattcaaggttgaagactcctccagtgggcagcgcctgcgcctggtcgcagtcccaggaggcgatgggcttcatgccgcagtacaggctgcgcgccatggcgtcgcccgcgcccaccgccgccgggaaccccagctcccgccggagcagccggtacgggctgaacgcggagttcctagccataaacggtgaataacccttcgaacccattgtggcaggacaacgaactcacacaacgattaagtatttaaatgcaccacaagaaattaagtacacagcatggtagcgtagtaaatgctttgctctaatttatatattcaagcaattttgtctacattttccatttagtttacgtaaataaaaatagaatgagaag

SEQ ID NO: 1181 - DNA, 3077 bp, Plutella xylostella
gctcaatgttaatatattttataaggataaaacaacacttcccatgattagtacaaaataaaattaaatatttgttagtttttttacataggtaaaatgtattttaaaattacagaacatatgaaggactacacactgaattgagataaaatacttagtactgacttcgaaaattatgtaagccactttagtttataacaatatgtacttattgcatcaattaatgattatttggcagaccaaaagagattttccaacagtgcataataggtcattaaacctaattattataagtgaatttggaatagaagctgtaagaaaatctgcaattagactagccactacaccttacataccgaaacatggctaagaacttgaatatgtgttccagcatacaagtgagctgcatacaggcaacaaggggccagcatacacccaaatataaattatttttaagtaatagttcatagatagtaataattttaatatattttgtacaataaaatacaattaagtacaacttgtagcaaagatattaaagagagtaatatttatctcacgtgttaaagctgcaacaacgtgtgtacgcgcaggcatatttacacagacacacgcacgcacgccgcacgcacgcacgcggcgcactcggccggcggccactgcactatagtacatctttaatttattacttaaatagaatatgaagacacgcccaagctgaaaacttgtcgcttattttacatatttcaatgcatgattagccaatgaacatgccggtacttcactagcagacgctattaaataatacattgatcgtcgcttaatatcacagctaattatgctttgaaaattatagacatgtctaattttcactaatgtagataacaatgtagagtataagtagacaatctgaataaatttacattacaatatcatgtcttttcatatgaaaaatttaaaattacattaccaaaaattaaacagtgcagcgcattataaataaatgtgcataccttaacatttaattgactaaataaatttgttgcctgcagatctgatatattttaaatatcgagaggtaatcttaagagaaattttaatttcaactattgaaaaaaagttaatttgaaatttaaaaatattttgtatctattacgacaattcccttcaaatccacctagttaatatgaatgtgaaatatcattccgaagctgagtctccatcacacatatttcactaccactataaacgtggatcaaaaagtaaggatcgaagagaaatagtgacttgacacttcacgagtgtgcattgctgttgacatgaggcttcttctcttgaggatcaggagtacgctgcccatcacgccgaggaggcatgcgctcgttgatggcatcaagccccttagcttcagcgaatgaagtgatcttgtggtttggtgagaacccttggagggcattcttcagggaagtcttaccacctgacagtgcacccagcggcagggctccagttggagtcaagcccttcagctgcagaacagattcactctcctcacggagcacagagaatacatgagccatttttccaatggcacggatcttgttacgaataacttctttcctgagattagcttcctccaatcctgcttcttcaccttctgtcatcaactcatcatcagagcagatgttcaagacattgaccagcatttcagtgactttctcaccaacaaagggaagagaccaggtgaatacatccatgaagttgggcagccagtacgggtgcggggagcagttgaactgccggatgttcatgacattgttctcgtacttcagcacggccgccttgttgttgtacacatccaagtagttgggagcggagaagatggtgatgagactcgggaagcccgtggtctggctcttgcggtacattctgtacccagcatcttgagcttcatgcgctcgaatgatagacagtaagttgtttctttgaaggaagtcacaacaggcagcatagctatagaaatatgaacaacctctgacagagttgtgcgagaaatgctcggcattcttctcattcccaaagtcttcaagaggatcagaccacagcaggtcacacatggcaccaaatgcagggggttctttgaatctatctagtttgcggatatcatctaggttgttgatctcgggggagagcccgccgtgcacgcacaggaactgctggttcatgagcgccgccagcggcaggcagtcgaaggcgtccatgcacgcgtcgtaaaccttctccgaatatttgattttgcattcctgtttgaaggtgaagtactcagtcagatgtcggcactcgtggttgccgcgtaacaagaataacgtcttcggaaaacacaacttcagcgcccagaggtagagaacacattctatactgaaataacctcgatccacatagtcacctaagaataaatacttagtgcaagagggagatcctccgacctcgaacaatttcatcaaatcataaaattggccatggacgtccccgcacaccgtcaccggcgaatcaatctcgatcatcgtcttctcagatcgtagcagggtggcaccatcttggatgattcgtaaagccgcattttcttcaattcgaccttctaggataaaatgttgcttcagtacctcgggcaagggttttccacttttttcatcgaatacctctgatactgtgagcttgtggctgggagggaaagcaacactttggatcatacgctgcgtagtcgacactttatcattgctcccggacatatttgtcacataaaaaacactatttctaatccatacacgccactattttcaaaatggcagaatagatataatactaaaacagaatctcgatttcacgacggggaaactactgcgcactggaaaacaatgcgcaaacatctggcgagtggtcaataaaataaacagggatatcgagcgcgttttagtacttttgaaaatactaataaaatagtaacactggaaagatcgccagtctcttatctttttttaattttaatcattacgttttgttgctcggagtttagtttggat

SEQ ID NO: 1182 - DNA, 1059 bp, Plutella xylostella
cttgtgcatcgcctactgctccttcgcccgttccagtcagtgtgccgtcaccagtagcagagccatcgaatccagacatttccatatttgaatcatcttcgccgaaatttgtctcatcattattagtgccatcatcgtcatcgtcccacatactctcattaacaaattcaggttccattttcggtgccacagcgttattttcatcttcgtcaggtatcgtcacaaattcatctttggccgatcctgatggtccagcttctaatggatccacacatttccgtttcacaggtccaccagattgggatgatgaagaattatttgatgctattgatggtctattcggtctcttaacggctactggagttgaggagggcttagaatctaaatcagtctctaacttagtcataacagattgcctttgttgtgacgacctcgggcctggccttgaggtcggctttggtttggatggcgtggaactttcttcattttgatttccggttaaacctttcacttgaagttgttccgctgtactaataaacgatgctaactcttcttgcttaacattaacttcaccttggtacataaactgtaataagtctcttaacgctgaatgactaacgtcttttaaaaatactataggatgttgcgtcgggttcattttgaacatttcttgaaagaagggagaacatactgacaaaactagtttatgagcttgcaatagccttccctcagcggctaaagtcacatccactaaatctccacgcgacagcaggccgtggaagcctgctgacatgttggcgtggaaattgttccaacataatgaaaattgttcgtccgacgccatgatggcggcgttacaaaacgaaacctatcctatgaactttgtacttgaaattccggtttgaaacatttaaatatattaatattatatttcaacactgattaataactgtttcatcacacgtcctccccgcttgaatgttggattgtaaatgatgacgcaatgtgacgttcactgtgtcgtcacgaatgcgcccgccttcaagttcaaaatgtcac

SEQ ID NO: 1183 - DNA, 1869 bp, Plutella xylostella
cggtgaaattatgtatttgtatagagtttttttaaccatagacaagacaagatgttaaacgcttcccaagtattctacgtgtgttaaatacaattaataacgaattatacgaaatacacttttattaaacttaagtgagatagcagacatcgccctgaacactacgataaatttgcgaattaaataaaatttgataacattgtacgtacgcactatacgtaaatattatttaacagtctcaaagtacatacatacaattataaatagtataacaatacgcgagcgatgtctgcaacatcacaggaggccggccgttcaaaaacaacgttccatttttaaataatgaaacaaaaagtttaaacgaaacggccagcacgaaaaagtcttacgaaaattaaagtttgcagtccacactcaatgttgccagctctcgggcaaaatgagatcgaacgacacgagaaaaataatcgtcctgtgtttttttatggaaataaatatgtcttttccatgtcttatccgtgtgtgaagtctaggacgttgtctaaagagaagagttccttgtacagagccgggaactgatggttcgggtgaagagccttgaaccggcagagagcctccaggtgcatcagggacaggtctctgaacgtaggtatcttggccatgagcgtgtcgagcacggtgacgtcccccttgatgggcgcgtggttggcctcgatctcctgctgcatggccgccagcgacatgttgtacagacacgtgatctcgtggttgccgcgcacgccgtgtcgctctggccaaagcagcaccaggctctggtacagcgccagctcggtctcggtgagcttcagccgcgcgatggacttggccgcctcgaagatggacatcaccagcgtcatgtcgctcgggtggcgcgccctgacgcactccctgatgggcagcaccacgtctccgtacagcacctggtcgcgctgcacgtcgatcaggcgggacatgcgcactatagccagctcgaaagaaccggacttaagcagcaagatctggtcgtcctggctgagcttcatgaagccggggatgagtttggcgaactcgatgatgttctggatcatgctggtgagcttgtccgcgcagtcgagccaggtctcctcgtacgacatggacgtgtagctgagaagcttggacacatctggtggtttcctgaacatctcgtgaatgtactcgagcttcgggtttgtgttggcgtgggcctcggccaggctcttcaccagaaccttgctgatgtcaccttcggcgtggccaatgaagttgttatccaggaacccggtcggtttaggctcgtatgccgtggtggagtccaccacgaagtcggcagacacgtcgtacgtctgctgagcgttctgctgagtcatgccccccatggcggaggggagggtcgggcccgcgttgttgtaggtgaatggtgacgcgtagttggagtagttgtaatgatactggtcgctggagcttggcgtctggcattgggcgtcgaacaccgaatccgggacagcatcggtttgggctcgaatctgcgcctgatgatacttcacctcctcctccaccttctcacgctgtttcttcgacatgcggccgaattttacagcatcacgactcatgcccagcttcaggcacttctgcaggcggcagtactggcatcggttgcggttcactcggtccaccacgcaggccttgttgcgcggacactggtagttcaccactgtactctggctgcgtcggaagaagcccttgcagccctcgcaagtgatgacgccgtagtgcacccccgaagatttgtcgccgcatactttacacgggattatctcgatttgggctcgt

SEQ ID NO: 1184 - DNA, 2242 bp, Plutella xylostella
gctttattataattaatgtctaaatagatggatcatcatataaatgttatctagtacaacctacaagacccggcgtccagagcggcgggctgcgtcgctctcgacgccccgactcattccatcacatacaggttttacaaatcatttttgttaacgtttttgtacagccatatacaataattttcaattacatctagacgtaaaaaatctgaggtgtcataggaaactacgcttcctataaaatttaattacagggggaatgaggagcagctacgcttgtgacgtgcgaccggcaaggcagacctcgggactatgactatcagtacaggactttacaatcatcactataacctaatactaactactacaacataagcatcgcccactcgactcgataagcgctcactccggtgctcccggaggctcacataactaaataacttaaatataaaaatatacaaaaatatcatctcctcaaataatcgcaactatacactccggcactacacaatattcgacataatgtacgattaaagccggtttttataacttaaacgagagctcgactgaagaaaattacataaacaaaaaattataataatacaatcacgactatagtgccgattgtctagaactgcctgcggcattccttcatcacttcaagattcaaggtcccctagcccagctaattgttaatcaatctacgacgagctaaattacggaaatgcacggcttcttcggaccgctgccttcccttcgattcataaattacacgttgaatgagagacgttcaaatatttatacatagattcatacgaacaacgaataatactagaacacttatttgtctaccgagacgggcgcggcgacgcgacgccgcggcatcggtcgtcgacgacgctgtacaataattgttaacgttaatcgttctgtacatcagtctgtcgctacgcgtatgtacagccgcctgctcgcccgcctgcgtcgcaccgtccgcgccacaaatatacaataacactaacattataatttaattaatacgaaacgagcttacgatacagagatacagcgggtgcacgacaatacatctagtcagattttacacggcgggcggccggcttacgctacgagatcgcggcggcgcggcggcgggcggcgaggccacggctctctatacttacaaatgtacaatcgcaaatattcacaaaatttataataggcggggagatggtgtgtagagagggcgcggcgactacagcgcggcgccgggcggcggcggcccgatggggcccagctcgggcgccttcatgaagaacttctccagcttggcgatgatgtgcttgccgtacgtgtacttgcgcagcgagcccacgtgcggccggatcttgtgcatcagcaccttgcgctgcgtcggctccgccacgtcgatcatcttctgcaccacgtagttggcgtactggtccttcatcatcacgtgtagcgcattgtcgttgaagccgcacagctcgtcgatgagcagcgcgcgctcggagcgcgaggcgtgcgacacgcacttctccaccacgttggaggcgaacttgtgctggctgagcggcagcaccttcccgcgcaccgccgccaccagccgcgcgcggtcctcgcccgcgccgtgctccagcacgtgctgcaccacgtagttgccgtactggtcctgtatgagctgctcggtgtgcgcgtgcagctcgtgcagcacgggcgcggtctgctcgggcgtgcagtgctcgaggatgcgctggatcacgcggcagccgtacgggtgcgtcgacagcgcgtacacctgccccgcgaacgcgttgattatgaactgcagcgccgtcggctccacgcattctatgcatttttgtaccacgtggttcccgttctggtccttgacgcacttgagcacgtgtccgtcgagctcgcgcaccacctcctgctgctgctcggcggggatggactccagcgccttctggatcacgcggcagccgtacatctgcagcgccagcgccagcacgtgcccgcgaaccataattaccttttgcgccagcgtcgtcttttgctccgtggttccgaactcgaagaatttctgtatgacatagttcccgaacacgtcggtcatgaggctgtacgcggcgccgattatctcattgaataccatttgtttctcttggactgttgctctttctaatttctgttggatgaacctggagccgtgctggtcctg

SEQ ID NO: 1185 - DNA, 3057 bp, Plutella xylostella
atctgtcacatggactttgatattcgctttgctgctatccgggtttatgagtcccttgatagattctagttggacttctaagtaatattcgttgacagcttcgtagtctagtgagctggagttgaggtagatagcacagtctcggtcgtcgtttagtatcacgtagaatactcctttttgcgaagagtcagtcaaccgacacttcaagggagtatccttggaatgagcgcgcttgttcagcagcggcagtatccgcaccagggtgccgttgggagagttctcagccacgtgctctgtgtagtccgtgtctgcgaagcctaggcccacatcgggcggaacggtggcggaatggctgacgtagaccgtcagacttgtgactgacgacatcacgggctcaccttggtcgtacgcttgtacgtccacagtatattcactatcagcttccttcctcaaatcgtctcgcaccctcaaagcccccgtatcaggctctacatggaagtacttggaagctttccctcgtccaaccagtttatatctaatcctgttgttaggagcagtggcgtcggcgtccgtagctatgactgtttcaacatgactgccgattgaagacgaatcctcgactgtgattggtcggatggctgatgtgaagattggcgagttgtcgtttttatcatcaacaataacttccaccatggtcgtatcaccgtcatcattgccattattctcttcagttccgactataatctcatgcctggccgtagtctccctgtctagaggcaggttagtccggatcatgccagatttgcgatctatggagaatagctctgtgtcgccacgcagtattgtgtaggttatctctggtattgtgtctgggtcttccgcctcaaccttaaccaccgggtagttagccgcattctcgggcacatgcacgctgtacaatgtcttgctgaaccgtggtgtctcgtcggacacgtccaacacttgcactgtgacggacgcggttcctagtcgtttatccggcgcgccgtcggtcgcggtcactacgaaggcgtattccttaatattctcatagtccagctcgctattcgtgctgatcattccagtgacattgtccacactgaacgggagatgagctggcacgttgtaggacaactgagcgttgaccccctcatccgcgtcgctcgcgtggacgtagcctacgaactcgcctgttagaccttctttgacattaaacaagtaggagtcccgctcgaactcggggttgttgtcgttgatgtcggtgaccttgatgttgacggtggccgtactggccagctttcctgggtcttctgcttttatcatcaactggtatctggtcaacacttctcggtcgagtttcctgatgacagtgatgatgcctgtagtggagccgattccaaactgacggaggtcattgcctgacactatggcgtagcttactgcctcgttctctgggtctttcgcagtgacagcgacgacggtggagttgatggcggcgccctccgacacctgcgcgtggtagtcccgcgcagagaacaccggcggcctggtgttcgggccgggagctaccgccagctctatgatacccgtggacgagaggccgccggcgtccttcactgtcaccgtcactgagtactgctcgccggcttgcagacgacctgtgctggaaatgacgccagtctgcgggtcgatggtgaacttgttccctccgttgttggacacgtggtagatgctgtaggtcacgcgggcattgtctccggcgtctatgtctaccgcttccaccttataaaccggcgcagggtccaagctagcggacacagtgacgggctgagtcttcctaatgacaggcgcgttgtcgttctcatccaacaattgtactgccagggaaaggggggctgaggccgcgccgccgttcgcttctcgagctaccacctgaaatctgaacttatccgggttgggcggatcccggtcgagcttctcgtcgttgacaacgaggaacccttcgctatcgatgtcgaagtagttggtcgtcagctcgtatgtgtactctggtattatgtcgccgggacccaaatccggatcactgacgctcaaccgcaccggttccccctgtctatccagcaccctggttcccttcacgctattctccatgacctctccttcatcagcggtcgcctgtactatgggagggctggcgtcgaccggacgcactgttactgtgagcttggcggttgtgaagcgacgggatggggacacttcttctgccttaataaccagcacaaacttcttcgcaacactagtatccacagccactagctgcctcacagccccactgttaggatcaatagcgaagtaatcatcccagacgtcaggctctcctgactctatgctgtatctgatgcgagcgtcgagggtgtccatgtctaccgcctggatcttttctggctctatggagaggagaccggctaaaacgccgctgtttacataactagagtactccggattaatgcaagccccctcatgtagactgcatcccttgtagatgaacgaggggtcctggtcgtcatcgtccttcacgttgactgtgagtgtggtggtgctggacagacgcttcttggtatcacgggcacggtcagaagctacaatagtgactagatattgctgcgtgcgttcgtaatccagcgtcctgttgacggtgacctgcccctgatgaggcagagctatcgagaagtatccatagccatcttctgcgttgttagctcttagagtttcattgtctcctggtactatgaagtactcggctaacccgttcacgccggcgtcttggtcgactgccttgatgttgttgaatatggtcgtccctattggtgttaactcagaaatggtagtttcatacggagtgtcgacaaagaccggctcactgtcgttgatgtccgacaccctcactatgactggtatagtgcgccttttcttagtcgctatcacctggcacaccaactgaaacaccatgtgcgacagattccccgggtcgcgatccag

SEQ ID NO: 1186 - DNA, 4082 bp, Plutella xylostella
agttgttggaaaaaaatattgtgtgtgtaatttatagaaacaattttaaaaggtttagatttgaaattgcaaattatggagcagaaaattataatttgaaataataaccctgaacctgacaaaagattacgtgatggtgctgtgttgttaaaacaaggcccggctaagggttatgttcggaattcttcttccaacaacagaatcaatttaggttaatttagcttaatatttaacataaagatttccaaaacaccgatcatgcgtattttagaatcgttagggaggcgggaagcacaggccaatctgagttagagttagtactagaaataaaattaaagctggaaaagccagaaaaatacaaggttttatacttaaataagatagaaaattggaaatcataaataatacagcctaatatgtgacgtgttggtgtgttgcgaataaaatagctcagatgcttaagtatttgcgttatagcaacgtgctaactaaatatatgtacatatataaatatatctacgaatatacataaatatatacaggaaagagtagtactaagatatactaatgttctaatgtcacgaagttcattccggaaaacaaaaagactgtaacaaaaatgtttttttttaaataattgcactacgaataaacacagattaacacacaaccactatgtgttctagaacgtgacgcagactaaacaaacccactaagttctagagtcgtgcacgacacatcgcccgccgtcactaggtaacgctacttgtaatatggaagagtgaaaggcaagagggaaacattctaagacttctctagattggacttctagaaggaagcgatcagaaaataaatcaagagaaacctatgacagagaaagtcggtatactatgtttaaagttattttaaaagttacagtatgtatctatgaggagtacacagtggtatgacgccgctcgctcagtcggcggggcgggcggggcgggggcggtacattatcactcttccacatccatttacaaagggtcatgttgattcacaagcagccgcactattcttgccaattttaaatcgattgaaccgcgacagagatgagaatagtgggctgggcgtcgtgtgaacccatgatgtatgtaatctagaagcatcgggtcgtggtctaggcgcgagtgggagggccaaccttctgttcacgaggttgtcccgatatgggtcccgcggctgccgcttcatgatatctgactcgggcgcctcatacgccaatgagatagctggcaccatgtcggttcccagatcgatacacaggatggtaacggtaccaaggggaagggggatatcgcacaggatgaaagcgaggaagggggagatctcggggatgttggaggtgagcgtgtaagcgatggacttcttgaggttgtcgaagatcagtcggccctcctccacgccggtcacgatcgacgcgaagttgtcgtccagcagaatcatgtcggcagcctgcttagacacatcagatccagcgatacccatggcgactccgatgtcggccttcttgagcgcgggcgagtcgttgactccgtcaccggtcacggccacgatggctccgaggcgctggcatccctccacaatgatcagcttctgctggggcgacgtacgggcgaacacaatttcggtgtggtacttgagaatctcgtcgagttggtccgagccgatgtccctcaactcggtcccgtggacgacggcggccttcgcctcgcgcgggttgacctcggacacggggatgttgagccgcgccgcgatgtcctccaccgtctcgttgccctccgagatgatgcccaccgacttggcgatggccttggcagtgattgggtggtcaccggtgaccatgattaccttaataccagcagaccggcacttagcaacagcatcaggcacagcagctcggggcgggtcaatcatactcatgaggccgacgaagcggaggttctcttgcgggaagttggggtcgtctgtgttgaacttgtagccgatggggtacttgtccgatggcagctgcaggtcgcagaacccgagcactcgctcgccgagacctccgagttcaaggtacgcgttgttgaatgcctccttcatttcctcgtccagtaccttctccttgccgccaatgaagatggtgctgcatctctccagaatcctctcaggagctcccttcatcacaagcaggtggcgcgggtcgctagggtcatcgctctcgtggatcgaaacctgatacttgttggtcgagttgaagggaatctcgcacactttcttgttcctcttcctgatggacagtacatctccaagggccagttccatgcacttgagcagggcagcctccgaggcgtctccggccacttccttcttcaggatgggcactccgtcctggcctcccttgaactcggcgcggttgcagagggtcgcgatcttggctagagccttgaatccggggctggtgcggtcgtattgtactccagactggtcctcagtggtgtcggcctcaatgatctggttgtcgaaccacatgtgggcgacggtcatcctgttctgcgtgagggttccggtcttgtcagagcagatggtcgaggtggagccgagggtctccacggcttccaggttcttgacgaggcagttcttggacgccatccgcttggcagtgagggtcagacatacggttacggtggccagtaaaccttcgggtacgttcgctacgatgataccaataaggaagatgacagcgtccagccagtggtagccgaggatgaaagcgatgaggaagaatgtgactccgaggaacacggccacgccggtgatgaggtggatgaagtggtggatctccttggcgatgggcgtctctccggtgtccagacccgacgccagaccggcgatacggcccatcacggtgttgtctccacagcagatcacgattcccttagcggtgccctcaacagcgttggtagagaagaaagccaggttcttggtctcaagcgggttctcgttggtgaagtcggcgcctcgggattgcggctcggattctccggtcaaactcgagttgtccactttgaagccacgggattccacgatacggatgtcagcagggatacggtcgccaaatttcacctcaacaatgtctccaagcaccaagtcctcggccctgagcgtcagtttctccccctcgcggatgacggtcgcgaactggggcaccatgttcttgaaggactccatgatcttggacgacttgctttcctggtagtacgagaagattccggtcacgatcaccaccgccgccaacacgattccgaggtacaagttgtcgtctgctggttcttcaacggtactcgcctgaataccgtaggcaataaagcaaagtatagcaccaatccaaagtaataacgcgaatcctccaaacagatttttacaaaacttcacccactcgggcgtctgtttgggcggcgtgagcgcgtttggaccatctctttcaaggttttctttcgcttttgcgtgactaaggccattttctgggtgtgtttgaaatctttggtagagttcttcgggagttactttgtggaagtcaatgtccaactcttgcttgaggtcatctaaatctcctggtttccgttttttcgcgggaggcttgcggcgagtcttaaagactccgtctgctgttcgattatcgtccttaactggcccgatggtggcgacgcgatatgagtccgatctgccatgctcgcccattgtggctagtctttattcaaaaggcggataaaaggaacgagccgcctctgtgtctcgcctgggtccctctagcgtgctcgggtcgtcgctagttctgcaacaacgacgggaacctttacggcttccttccaacgaaaaacttaaaaggtgtgcgcttcttcctcgtcgagtctggtgtcggcactggggctatgtcatcgtggtacggaactgaacccggtatgaggtggtgagcgcggggcggacgcgacgacgcttgctggcctggtccgggcggcgactgacggcggggccggcgcgtatcgagccggcggcgc

SEQ ID NO: 1187 - DNA, 2320 bp, Plutella xylostella
caaatctcgagacctgagccaactataccttgtttcacggggaaatacatctgacagaacccttattacattcgaataagggtattttttgtttgtatctttccccgtgaaatggaatatacacaccccgatcgttttgatatacatgtataaaattatattactactatgttttgaatactagcgtaccctccgacaaggttcctaatcaatgacaaccgagtttagcagtttattatacctacgtagtatttatcaataagtcacattatacgggttcgttaacgtgattttgacaggtcccacgttagaaatatatggagaggcgtgaacgcgccgctattaaataaactgtcaacgctgacgtagcaacctttttactattcaaagtgacataacttgtatgaatttgaaagcattacggctacggttggtttcgaacgcattgattatgatccttgtcgcagaatgtataataagctgcctagatgacgtgttcggagtcgatctctccctgttcgacggtcatgtacattccttcctcctcgtacgtagagtcgtgcttcgcgaggatacgcagcagggggcggagcttcatccaccattgctgcttaggtattctttgcgcaaagttagtctgcgctttcagatcctcaagtggcgtgaacttgtactgcctcttgacaactcccaacaagcaggcggagtcgggcgcgttgctcggccccttctggatggcctccaccagccagtgcaggcacttggccgccatcttggtgcccatgttgcggtcgaacggagttggggagcctccttgctgcatgtggcccagcacattcatcctggccgtaaacaggcctttcccctcctcagagtacagcctgtatataaagtctgtattataattatcgctggccttctcgttacgtaggatgagtccacgctggatgccgcccgtcatcttggacgccatgtggtacacgtcttgttggaggtccttgatggagaatttttcttcgtagatgtaggctgcgtctgcgccgccggctacgccagccagcgtcgccaagtaaccgcagtatcctcccatggtttcaattacgaatactctgcgtttggttccctgcgcagactgtcggatgcggtcgcatatctccgtgatctcattaagtgcagtatcagctccgagcgagaagtccgtcccgggaacattgttgctgatcgtggacggaatcaccacgagagggatgcagaattccgggaattgtgtgcgcgactcgtatagctctagaccagcttggtaagcctcgaatcctccaatgatgagcagtccctggatgttgaactgcttgatgcgagccgcgatctcggccttcttgtccccgggcagggtgcgcttggtgccgaggaacgcgcctccttgcgccacccagccggtcacgtccgaccagtccatctgcacaatgttcccgctaatgaacccttccattccgtcgtggatgccgagcacggtgtcgccgcggtagatgcagttgcgcacgaacgagcgcacagccgcgttcatgccgcacgctggtgcgcccacgtgcatcacggctagcgtgtagccttcaacaggctttccggcgtcgtcgaaggcctccttgggcggcttgaggcgcgtcagcatcttgtaggtctcgaggttgcgcgcgaagctgcgcccgcgcagctgcaccgccaggtcccagttcttgtccgccattgcctgcgccacagccttggtccgtcgcacgcactccatgagcggcaggcgcacggcctggttgccgtccagcgacaccacgcagggctccgtgtcgggcgtggcctccatcagcgccatcaccgcctccgcgcccatgcggcaacccaagatcctgtcgaaagcggagggagaccctcctctctgcacatgtccgaggactgtgatcctggtgtcctgctgcaggttctccaccaccacattcttgaccagctccgcagtgattggcttgccttcacggtctatagcgccttctgctactatgatgatgtttagcctctgaccggatttcctctcctgtgccaatcgtttgcaaagcttttcaacccagttattgggaacagggtcctcgggaatgaatacttggtctgcctcgctcgccagagcggccactaatgccagataaccgcagtgtctgcccatgacctccatgatgaaggtgcgctggtgcgagtaggcggtgctgacgatggcgtcgatggcctcgatgatgcggtgcagcgccgagtccgtcccgatcgtcatgtccgtgccgca

SEQ ID NO: 1188 - DNA, 1366 bp, Plutella xylostella
gggccatttaattttatttagatgtttattcattttaaatctaaattagtttggtcctgtaataatattaggtatgtataccctatcttacttaggtaggtacctatatcaaacgctaactgcgatgatttatacttaactagcaacaatgttatataacattaatattgcaataataaaattatatcatatagctataataaagtttacccaagcaccgcaatatgatacagtcttcggcggggtctattcaataataagtaaaattttgtaccgaataaaattaatccttgtctatttggcacaaaatttcgtaatttatagcaacaccaaaggtttattgcatttttattacccgccttaatttctcgacgctaaaactaaagatctttatcacgatattccttacatttaatgtaacaaagtttattaaactcggaacttttaaacacattaatattattaatctctatcgataatcttacacttactttttatcttacaacataactttttaattatttacaggacgcttaacatttaaaagttcatagaacgtactcgaaatatatcatagatatatgggataaacattaccaggtttcgacgagcacgatgacgcactttgtgaatttaaactaattctggccatcgcggtcgtttactcgctggtaaaaaaaacttattctaaacgcacacagcgaagtcccgtccagtacaattccagagaaaattacctttcccgaattgaatggagggaaacacacgacgcctattaattcgcggcttcagacacactccgaatgccgacgaaaattcggtcgtccaaacgtgtcgactgcgttgcattttgcgttgcaatcacaaaatgcaaccagccatcgtcgtccgcattaccgcggctctcgctatcctatttacagcaataaatatttacagtacactacaactagggaatattgcaacagtttgagtattgagtagcttataggcaatacgggtggcagaattggtagacgagtcgttggctcctctccgtcttcttcatgatgcccttcttgtagtactgcctgatgctgcgcgacagcttgtcatagttcatggcaggccggttcttcctcttgccccacagccgagccacgcggacggaatcctcaatcttgaacaccccgttacttcggtctaaccaccgtatcgcggatccatgcagctgtggggatgcgagcagctccttgaggaactgccacaggtgtatgtgggtgctgcccgacttggccttgccagggggcgcggctgagggggactccacgtcttcttcatcactcatgtcgtcagctgacggcagcccggccggcttggggttggg

SEQ ID NO: 1189 - DNA, 2028 bp, Plutella xylostella
gggttatttacatctttgatacgttttcgtaaaataatagtacctatataatatataatgaatgagtaggtaggtatattgtgacggtggacagtagctaaaattatataactcactcaaaatttatatgattatacctaaagctaacttgagttttatgctataagttgtaagattgaaaaataacataaattctggaatcctctaagtcaattgtgtaagtacctatgtacatctagattacctattatcgcaccaataaaacatttcattatttactcaatatacaatttaagtagccaaagaaacctctataaatttattccaccatcttgacaaataaaacattatttcatacattcaatatttcataagtttttcatccaggaccaaatcattattgctctcaaagttactttaaagcatagcattggaatacaattttctaaactacatccctgttgcaaactgaactttaccactaatcaataacgtacatattcgtgctcgtcagtttgcagtacaattgagttagcctttacttctttcagtttgtttcaattcgtcgtcatctggcgtgtctttggtctccgaaggggcttctagaaccttcttgttttctaaagcttgcttcactgcctctatggtgtcttgtggttccgctatcgaaatctttttgccatctctatcgtatgagaccccgagtatttgtccgggcgtatcttcctccaactctgcataagcgtaaaggagggccttctgttttgccgatagcgattttggaacctgtattttaatatgtacgtaatggtctccgtagcccagttggttgactctcttcatgcccttctgcgacagtctgatgacggcgtgcgacgaggtgcccggcatcacctgcagggtatggtcttcgtataagccttgtattcttactgttccacctaaaagagcttgtgaaacggagacactacaatcagtatgcacgtcaggcccgtctcttctgaagtagttggacttgtccactttgaaggtgatgaaaacctcattactgccgacgttcattcgcacagtctggccgtcctcaaccccggctgggacggggactgtcaccttcttgcgttgcacagactgtcctttcccttcacactccacgcaggggaacttgatgatcatccgggtgccgtgacagtgtctacatgtcgacctcatcacaaatggacctctagagaaggtttccatgccagtgccattacaatagttgcatttgacagccttagtgcccggctcggcccggccgccctgacacttaggacatgtgtctatgatgttcaggtttatgtctttgttcacacctcgggctgcttccgtgaaccgaagatttactatgagctcttgtgcagcaccaaacccaaactggctttcagcgaagtcactgaaagagtctttcctgaaaccagcatcgccaaatatcttacgaaaaagttcttcagggtctattgtggacttgtattgccattggtttgtgaagccgtccggtcctgcgccggcacccatgcctcccatctggtcagatgtggtgccgtatgtgtcatattgtttacgcttgttctcatcagatagaatctcgtaagcttcagatacttcttggaacttcttcggggcatccggatcagatttgttggcatcagggtggtatttcttagcgagctgataatacgccttcttgatatctttctgagaagcattcttggatactccaaggaccttgtagtaatcccctcgggcgtttaaaaggctggtcgtgtgaaacaaccgctgtctgccaatgccgacattgtacttcaacacagggttcgacaatgtggtagcagcaagaacggaaccacccgaatatttgtcacaactattacacctgtgaacgaatcggcatggagctttggaaatattattggaaacaacagcactaaaggtttttgggttcaaaaaccctatgatactccgggaaggagccattttgaaagaattttc

SEQ ID NO: 1190 - DNA, 3005 bp, Plutella xylostella
tttatttttatcattgaaataacgttttcatagccattgtacggcgtacctattgaacaacaaattattatcagtcagtacattatataattaggtatagatacctacttgttagctaatatccaaaataactgcatataaattgccatgtcttttcttatcttcctaaaattaccacaaagtatgattaattataattatatacagcttagggtagatgtgtgacattattttaacttaatttcacaataaaatataacttcttacgtaatctatataatatcacagcgaccagcgaccgatcgaagcggagtaggtacttacgattacgtaggtactactaggtaccctaggtaggttacaagttattcccgagcccgaggaaagggtggattgtttactaagttcattaaataacataattattagtttgtttccattttaattaactaattgcatgtccgttgtaatgttattttcagttcaagttacataaattacttacctaaaacctaggtaggtaggagaaatattttatatacttacttataataatatttaggagtttgtcgatactttacttcatgctgcatgaattacaaagctctatcattcacgtggcatatcgccggtataaagcctacctatataaatatatttaaattaaattagtaaatctcaaaaaatataggtaattattttgccttaactatgctaaaaccttatcataaacgaaatacgactgcagcacctcggatttgtctgaatgtctaaagaaggacgtgtatgtacgtaggtattcattcttatttgtatttgttccatagtaagtacctaccactaggctggaaaacctctgtacaatgtgaaaacatcgtctcaacctttcctactaacactttctaaaggcaccataacctctgcagttttatcgctttcagagtacgttctgttcctctccctccgtcccaagcagctggtgaagcaggtgtcccccgcgccgaacgtctctccgtcctccagcgactgcggcatcggcttgtccatcgtctcgggcagcaccaggcataggaagcctgacactatcgccaccaccccgaatataattgcagggatcttcggattgaatgagtcaagcaacgttatcaagggagtcagcgctcctgaagtcctcgcgcacatggagccgagtcccagcgcggagttgcgcaccaccgtggggaacagctcggccgagtagttgtatacaatcgcgaatgagccggcgatgaacagcttcccgaccatgaccacggcggtggacaacaggccgcccgacggcacgaaggacgccgcgatgcacgccgcgccgcccaccagcatcatgctgctgatcatcggacgacgaccccagatgtccaggaagtatatcaccgccgcatagctcggcaactcaacgaagcccatgatggctaaaatgaaataggggttgccttccagtttacccgtactgagcgacagaccgtagtatacgatcgaattggcgaagaagcagaggcaaatgttaagtgttttgtttctaaggtttggagttttgaacagatccatgacactggcgctaggagcctctgcacctttggatgactctgctttgccacgagacaccaactgtgcgcgatctaaacgttcatcagatcgattgcatttgagagctttctcgactatatcaatggactcctttaccctaccctgagcccacagccatctgggagattcatccatgatccagatgtgaggaataagaaggagtccgtggagaccgtaaatggtttgtagtagttgtcgattgtctatcaaagcgccccaagccgccaccagcatgatccctgcagcgaatgtggcctggaacatcaccccgcatatcgtccgcttgctaggccccaccagctccatagtgagcacgaagcctgtgatgtaagatccggcggaaccaaagatcccgtacagaaattggaatgctaaaagcgtccagtactcgggtatgtaggcgacgaggatgccgaagagtagttggaggacagcggaccagcagaatatgattttcctgcccatcttgtcggccaggccgcccagcacgacggcgccggtgaacacgcccagcatgtaggcggtctgcgccagcgagccgcgccagcgctggtcgcacaccaggtcccactcgatggctcgcgaggacgtgcggtacgtcgtgtcgtacacccaccggtcgcacgacactgattcattgtttctataaatgagacagttgtgcagatcacccgttggcgttaaaggaatcgctgacagtatgagtgaagagttccacggtgccgttgtgttgtcggtgtctacgttctctacccagcatctatggtcgggtactgcggcgacggtgaccagagacagcatgtgcatgccggcggtcagggccgacaggatgtgcaggaagaactggaagccctggtagcgaccgaagtcaccgagcttcgccatcatgtcttctagcgcttgatccttgtccatgtttgcgtgtgtgtgtgttcctcgtgtataatcctggtttcagtgataactgtgggtacactgcgatgttttggtcgtggcgcgcatgcgcgggagagcgtgcgccgagctggcgtgccggctgtcggacgaatggacgcgcgctcgccccgacaccgccacacttgtgcgaaaaaacacgatcggcctcttatctccacattagctcacacataatcacctcgacgtattacatacgtagctatagtgtagtaaaacgcgaagccctcagtggcctagtacttaaaatatgtactaataaagtccgcaggatatcttatcagttatagagaatagaaatgcagttcagtgactgagcggagtggcaacactaattagccgtcgaataagtatcgataaagttatatcactgaatgtaaactgagtattgtactattgaactcattatgataatgctgacccta

SEQ ID NO: 1191 - DNA, 3236 bp, Plutella xylostella
atcacctgtcaacaaatgtcaaactctcgtgcagatttttaggttatgttgtgttgaacttagtcaaaaacaaaataactttgcaacaatggaagtagaaaatgatttacctacttgtgttcaagcaagatttaaatcagataccggtgaagaaacaggcagtccattggatttgccattaaacattactaaagaccagttaacactgatctgcaatgctcttcttcaagaggaagacaaacctttcctattctttgttaatgatactgaaatcacgtctacactccaagaagcacttgatatcaaaagcttaaattctgaagaagttgtggaaataatataccagcaacaggctgtgttcagagtaagacctgtgactcggtgtacaagttcaataccaggccatgcagaggcagtcatatctacaagtttcagcccctcgggaagacaacttgctagtggctcgggagacaccacagttaggttctgggatctatccacacaaactcccctacatgtttgtaaaggtcacaccaactgggtgctctgcatcagctggtcaccagatggcgccaagttggcctcagcctgcaagcagggcaaggtcatgctgtgggacccagtcaccggactccagctcgggaagacaatggtcggccacaaacagtgggtcactgctttagcttgggaaccttatcacaggaatcccgactgccggaagctagcgagtgcctccaaggacggcgacgtgcggatctgggacacggtgacgtgcctcacggtcaccagcctcaccgggcactgcaaggccgtcacctccgtcaagtgggggggaggggggctcatctacacttcttcccaggacaggactataaaggtgtggagagcagaagacggcatcctctgcagaaccctcgaaggccacgcccactgggtcaactctgtcgctctaagtacagactatgtcctaaggacgggtccattccaccccataacagacagagatggatatataaaagacaagtcaatcctgcaacagcgcgcgctagaccgctatacagaggtatgtcctggcggccaggagcgattggtatcaggctcggatgacttcacgctgttcctgtggctgcccgacaaggagaagcggccgctcgcgcgcatgaccggacaccagcagcttattaacgatgtcaagttctcgccggatactaggctagtagcgtcagcatcgttcgacaagtcggtgaagctgtgggaggcggcgacgggcaagttcatcacgacgctgcgaggacacgttcaggccgtgtacaccgtcgcctggtccgcagactcgcgcctgctgctcagctccagcgctgactccacgctcaaagtttggagtatgaagactaagaagctggagctggacctgccggggcacgcggacgaggtgtacgccgtggactggtcgcccgacggcgcctgcgtcgcgtccggagggaaggacaaagtgctcaagttgtggcagcattgaaacaacgaaaaaagctattaaaaaataaactggtttattcagtgacatgagctgttattatttatacaaagtaacattattatccattacataacttaaaagccatcaattatgttatttaattttgatactcttcttgacattagccttgataccggaggcttctcctccgtagcgagtgacctcggtcctggcttcacggaccgctcccttcctcctgatctttgccttcctgtacttgagcttgtgcttgactcgagggttcctctgctccttcttcctatgtggtgtcaagcctttgttcttagccatttgatatgtaatgtgccttttatcagccacttcctcggcgacatcaactgatgatgatgatggtttattatcattgtgttcctgctccttagcagcttcatcattgtctgagaatccactctcttctgattcctcattgagtttagatgagccagcatcatcattgcttctgaagtagtctgttccctcatactcttcttcattgtcagatactccagtgtcctcaccttcatctttttcaattgaattaataagtttcagtttctttgatgcagactcagtagaacttttatctgatttacgtttactagttttcttgtcttgagagacctgcgttaactcaatttctaatttattactcacagcattcaaaatcttatcaatttgaggctttataacatcaacataaattggttccattttgtttagcatctgtctgtattgatacaatctctttatcacaggatgattttgaatgttgattttttggcttttgagtaacaggtagaaacttatatttgtgcaatagttcagtataagattgtaattagttttgacaaattttgatgctgggcacttgggtagcttaccatccttgatgagttctaatacaggttgaaggtcatctttggcaacagttagctttgttttaaaatcatcaataagtccggcaaattctgggctttctttttcaagaagttgcagtttctgtcgtttggacagctggctcagatcactcttaattacagctgtttctgtttcactcttttctgcttttttaaagaagtcaatggaaaaatcttcttcacttagttgttccaggagacgtttctggatatttttagcttcctcttcttccatcagagctgcttcctcatcatttccaaaccctccataatcttcatctacatagtctgtggcataataagacctcttcttcttgccccatgcttttgtatcaggcaagtcatcatctgacttctcttgaccctctacatcactatcagcaatttccaagtccttgttatctgcttcatcgtcagattctgaaaatgcatacatttcttcctcactgtcagaaccatgattttttcttttttttaccttctcgagcaactttttctctcttgctgaatattcatcttccgaatcggatggctcatagttgcccctcatgtcatacttggatccaattcttattttctcagccattctttaccgaaatttaaataaatccggacatgtgggtgcagactgcaggttatattttttttgttagtgatagtttaggaaactactatgcagtatagttctctgctattacagatgtgttataacaccacaagtagcgctgaacaccttttatattacaaaattcacaaagaaagtgaagcgaatactgctgttt

SEQ ID NO: 1192 - DNA, 3387 bp, Plutella xylostella
gcgtgtaagatattattattatattttatgtatgagctcatttatatccattctgaaggcacaaaatcttaatttctttgtttaaaactcgtctctatcactgtttatttacatttaatttttaaatggcagaattgtgaatctacatcattgctgctgcgagtttcacttcgccctaaaatattttgccgtgaaaaagttaatttacgtatatctttccaaactttaaaaccaatctttttactatacaactaaccttattacaggtttcgtcaaccgctctactctgttccatcaccattctctacactctctacgcagtagccgagtgcggatggtaagtgatgacgttgtgttggtgagtgaagggcgtcccaccggcaggttccacagacgcggggagctgtagggcgcgggcgcggcctccgagggtgcagcgggtgctgactcctgactctacttccacgggaagggaggcgtttgttaatgcggtgtatctgttggtcagcacgcccactagttcgcccaccaagtcgtctggtcccaccagacccaccaccaggtcgtttttggctcggggcacggagatcaccactagttgagcatcggatgacatgatgcggattgcgccgatctcagtaatctccgtaggcttcttcagcggcttgaacgtgacgtcatcgagcttgtacagcagcgaatcagtgacgaggacacagcgccccgccagcttgttgtgtttgttgaacttgtgcacgcggcacgagaagagggggacgatgttgtgcgtcctttggagggaggatagggcggctctgtatgtcgctgctttactattatagctgtcttgtgcgaggtagtccccgagccactgccgccgcgcgccccactcgcgccgccgccccttcagggcactcgccgcgcagatcttcatctttagttgtggccactgatccctcggtataggcttgagcgtgaggtaagccctccagcgtcggtaggcgggcggcaggcatgcgacgcgcgcgccgcgcggcgggggcggccagtgccggatgaggccgcggttgcgggctagttcggtttgtagctcggcgatgtagcggcggctgcggtagcgtctccaagcatggaagatgcgcaatgcggccttcatcttccgataccgctgcctcgccagcgcgcctcgccacagcttctgcagcagcaccactatcgaggggatcagctcggcccgggctgtctcgagctggtggaccgttttagcgctcctgataaacagcttcgtatgtccggcctggaagtcagtaaccgccaaatctctcaacaacaccagcacagcctccttatcactagtccctctataattcggccacgtgtactgagacagcatcttgtagcggcgcaggaagcggtcgtagcgctgccgggaagcgaacccggcgcgtcgcacacgcacgttctcgaccaggccgaggtaggacacttggtggcggaccagctgctcatcccagctattcggcgcctgcctcgggttgggcttgacgcagcgcacgtagaagggctccttgctgagcagcccctgcaccagcgcctgcatcgagttgcggaacagggtcgcggctgatggtggacgtttggaggtcttctgtatagtggtgccgccctccggccacatgtccttcagtgaagcattagtggacgagtgcagcagccgcttcaggtcctgccagagagagtcctggttcttgtccatgaagtttgtgatcgcgtaggtcacttcgccggcgtagtgggtgattctgaagtcgaccccgtgttgtagcttcttatccgtcggggccagttgtctcgacgtgtagtgcttgtgtccgctgagacgcttgtccatcgcctctagcagctgtctgtcggatatcttagtaggattgagacacgcctcatccataatagctatgatcccctggtgaggcgcgtcaatgagctcgcagatgacgcggttgttgaagtacgcgaccggcgtccacgtgatgccctcgcgggagtactcttcttgctcttgtttgagcactagttcaataaacagctgctgcagcttctcgttacaataattaatacagaactgctcgaagctgttggtgtcgaagatctcgaagccgtagatgtcgagaacgccgatcacggagctcgcgtgcgtgccggtagggacgtcgatcgctttgtttatctgctgcacgatccacgcgaagagccggtcgtaggcggccttggcgagcgcgtggcgcgtggcggcggcgtcgtgcagcgagtgttgcttgctgaccagctcgccgcccgcgcacagaacccgccccgccatgcacgcttggagagaagaggcggagatgccgagagatgagacgcattgtgagagcgggccgccgatgtggaggttgccgtcgggggtctcggagaaggttaattctcccagcaacacaacagcagcaactatactccagatctcgtccaccacactcttcgggaacccgagtgcgttgaaggcactgttagtggctgcgaacagctgtccgtcctgcgtggtgggacgcccgggacccaggaactggtactgagtggagggggcgaggcccagcttcgaggccttgcttgaggatagcagctggtagaaggcgtggaagttcctctcccccggctgctgcgcgaccacgcggctcttctccagcaggtagttgctgacgtggccgccggccgggtcgccgcccgcggagaagtggatgtccatgtactttccgaaacgagacgagttgtcgttgcggttggttttggcgtttccgaacgtctcgaggatggcgttcgactggattagcacgttttttattctgtcaatgtattccctctggttctccgtggtgttggctgcgatgtacttcatgatgaacttggaggcttcggtcttgcccgagccggactctcctgagatcagcacgcacgtgtctcgaccctgttgcctcagcaccctctggcatgcgtccgccacggcgtacacatgcggcggcacctcgaacatctcgcggccgcggtactgcatcatggtggcggctccgtagatgtccagcgtcttgtaggggttcacggagaccaggacttcgccgatgttcgtgtagatcttgttgtgctggaacctcaaatgcaaattctcaatgaacttatccgtggtcaggttgtccagcaggacgaagtcggatacaccgacttctggctgtgaagccattcttgcaaacacgtattaaactttaacaaaaagttcacaaaatttcacgagtttagattgtcaacaaaccgttagataaacaaacaacaggcataacctcccacgtcgaacatttc

SEQ ID NO: 1193 - DNA, 1287 bp, Plutella xylostella
tcctcgtctagcggaggcttcaggtccgcatgttgcagctggtgcgcggcgaacacctcatctctgcactcgataccgctgatgagatggttgacgcagacgacggcgacgggcttctgctgcttgtcggtgacgagggtggcctgcgtctgcacccatgcgtacccgccagccttggccaggaagcggtactggcctgtctcgcattgccccttggagaatagtgctttgaactgctgcgcgagcgcggcgctgtcaccggcgtggtggtactcgtacagcgagcgccccaccagctcctccggggagtagcccagagccgagcagagcccatcatcagcactagtgaaggtcatgtccgtgttgtgcttgctgaccgcccccgcgccccccgcgccctgcggtatggggcagccggccgctactagggcaccgcctgatgtgtcgttggatgggaccaggaggtgaccggagagcttgatcaccttataagaggcggacttgagatacacgttccgtccctttcccgtcagtgtacacttgaaccgcagcagcagctgtcgccgtcccgctcccccgcgcagcgcgtcgcgtatctcgtcgtgctcgcacgggtgactgaattcgaacacgctttggcccatgatttccatctgagacacaccaagatgctctgctatattctcgctgcagtaaaccacatctccctggcgagacagcacgatcccgaagccgtccagcgcgcgtaggtgcgacagagacgaacatacttcctccagggactgctgcgatagagttgagcatacttcgtccagggatgggggttggggctcggcggttttgttggtggattctggaagtagagcgacgacatcccgcactttgaggtacgatatggccagcctcataatagaggccttatccagttgctccacatcttccttcctggcaggcagagctgctgtgagctcggagaatatctggacttccttgttgcgccggcagcgtgccgccacgcgcgacttctccttgcgcttgtcattatttcttctcttctggttagctggttttgtagacatttctgtttttatcaataaaacgacactattatgaaaccttgcgatacgtatacaatctcagaacactgccaaggatagtaacatatcgcattccacgggtcgccagggtagtctttcttgtatttgcaccacgttatagtctcacaaacacaaaattaaacacattttacacttcacgaaaataacactttgtgatcttgttcactgc

SEQ ID NO: 1194 - DNA, 1783 bp, Plutella xylostella
tttggcagaacaaaaaaaatctagcttccattaatcaaaacgtataaagatattattacatctattattattaattcataatcgcaatacgtggaagtccgaataaacctcggttaaactttactactcgaagcactagtggtgttaaattctaaaaagtctttaagtagagttgtacgtcttttctccgctatatccatttgattctctaggtcgccgcggtccgtggtctccgcccgctctaccttccacgacaaattctcgatctcagcctctagttgcgcctgttggtactcaaacagctccttccttggcccgacgtccatgtagtaggcgaaggggtaggtgtactgcagcgtgtagcggcagcgcttcagcagccgcgccgagtcccacaggtactgccagtcgatccacgtgccctcgcccgccatcaccttctcattgatacgtcctttcagacaagccaaagtttgctcctccagtttcaacgagcgcgcgtggttctcccatctctcgtagtagtggagatatttcttcaacgcttctctagcctgagcatgttggctgtcactggacaagttggggtcctccttgtaccgactgcactcgtaatactcggagccgtgcgtcttccagtcgccgagacacacccagcagaagtcgtggcgacacgagccgcactgcatgtggttgcagccgccgttcttctctatgcagatctgacatttcgggcagtccttagtatgagcgctaatatagttggcagtctccgagtcgtcggcacacttggtgagccagcggcggatggtggcgcagtccgtgggcgcgtggtgcggcgcgccgcaggagaagcacgtgaggtgctcgcagcccgcgcagtccacgcgccacgcgccctcgcccgtgcacgcgcggaatatccactgacaatttggactaggacaaaatctgagttcagggtgagacttcacatggtctttgaacatgaactgttggtagcgctcccgcagtcttgcattaggcacgtgggacaggacaaagtcttccggagcccgcacctcacactcttgagccatgcactgaattgtattggaaacaccttgactgatttgcacttcaaaatgcatgccccagcagtcattgcagaagtagtgcccgcatgccagcccactaaactggttgggggccgggttggtggcgcacaccgcacacactgtacgactggtgccaacttgtgctacctgagtccgaggcttcacatgactgtatatgaggacctcattcgcattctctttgtacttcttgataatctcttgagcattccattcataagcgtgtagcatcaccttggcaagtgaaggtgtaatttgaaggctgttactgagtaattcgattgattcattcaataacttctcgacttcctcaactttaaggcacgagtattcaaagtattctggatcggatttgctcttgtcaatagtatccatgtcgcagtcatcattttccccgtagtaatcatactcatctccatcgttatccgaatattccatatcagattccgcagacattttgtcggacaactattcgatttatcccgaaaatcccaaagtaagatattgcacattacactaaaacattgcactacgaagtaattttttaatggaagatattatgtagtaaaaaccatagttaaattatgaagatcataataaattaagtatagaatacgggaagtaaataaataaatggtaaatgaattcagaaatcacaacgaaacgaa

SEQ ID NO: 1195 - DNA, 1544 bp, Plutella xylostella
tagttagcagtgctagtgtttctctattcgaaaaagcagaatttatggacaaattaaaaacttggtaaactagaaggtcaaaatgataccataatacatttcatcttagtatcacagatatattcaagtcaatttacacaaagtaggtacacaaatctccgttaaattcggcacctctccagtccaccaaaacactaaacaattttcggaattgctggaatatttcatttccacttcatttgttttgtctgtggtcctctctggggatatatctccgttgtctatggtagtcgggtctgagaagtggtgttgtcctgagccggtggccactataggccggtatggatgtatggacacactgttgcaacagtcggagtgtagaggaaacttaaaagatgcattatcagtttctacactcccagtatcgatgctcgaagtccaatcaactttgttcacgtcccacaccttcagtataccatcagttcctcctgtcatcaggtacttgccacacggcgatatatcgaagtatactctctggttagtgtccacggctctgctgaggatgttgagaggtctcctgtagtacctgatgtcccagactagcagtcggtggtctttgcgagccccagtcactagtttcaggccatctggagtgaatttcatgtgtgttactccaccagaatgcccatgcattttccctatgctcttgtaggtgtccagctcgctgacgctgtacaggctgatgctggtgttccacgagcccacggccagcaggttgctgtcggtcgccatgcacgatgcgggggaggatatcttgtgttctgcacagtctcggccgggcctgccaacatcaaaggttcttagcatctttttgtagccagcaatgatcctggtcccatcagaactgaatgtgacagataaggctggctccatctcgtccaccgcattgaagcctcggtagctgcatctcagggagccatcaaacgcatcccacatctgaactggggcattttgtagggtggttagccaacaacatgtctctggtacacaactgttcatagccgggtaccaacagtagtcatacactagacctgcctctttcacatgaatgaccgaatccaacacatcaataacccgatcgggcgtcaccgaatcgacatataaatcttttggtaactcaatgacatgcattcccttgttattgaccacggcgaggcagcacgtgccgtctggggaccacttacacccgcgcaggtaaggctgggactcatcaccatccttcagagagcgagaccacgaagagttgcagagctccaaaagagttttacttggaaatagtggtgggtattggaattgaggttggtcgccggtagcgatgttttcttcggatatttctacattttctggagtaatggttaacgctgtatcaggttcaatgtctagattttcaggttccattggtatttcatccatttctagtaattataggcaaaaaataaaatacataaccaacaaacaaacaagcttatttacaattgcgtatg

SEQ ID NO: 1196 - DNA, 3953 bp, Plutella xylostella
ccgcccccactggcccgccccagcgcgccccagtccgtgtccgagcccgcccctgagtcgtcttgaaagtcgttctggggcgccgtctgggccgaggtctccgcttctagctcgtcttggtattgcattaggaggcccatcttctccacagcatactggctggtaatcgtcaacagctgatgtccgaacttgtcatagttagccctcgtcacatgaggcaaagacaacatgtcttcagccgtctcgggaaggcgcgccgccatggcttttagggctgcaagcggcatgacagccactagtgtgatgttgcgagccgcgcccatttctctgcaagcctcaactaaatctgcataacaacggtcttcaatcctcctcactagcgccgtgacgggcgcggcgggcgcaagccgggacgggtctgatgatgtgactagtgaggacttcttctcacacttcatggggaagattatcttgaggttgccgttcattagttggtcgacttgcgggcccagtgctaggtaggcggacgcgatgtcgttgtgcagaactagccgctccgccagcagaccgcgaactacgagctgtcggagcagacgcggcgggtcgcctcggggccaggtcttgcatcgtccgtgtatatcactgttctgcagctccttcagccgctgctgcatggatccccggagagcgtcggccacgtgtagcagagtgtactgagcacgtccagtggaggcggacctcacccagcgcacgatgcgcttgcagtcctcggtcacgtctactggcttgaattcgtccttcctcatgcagttatcacacttggggtcgcactggtcgggactgagtcgctcgccgaggtatgacagcacctggctccggcggcactcgcccacgctctcgcaaacttccactatgcgcagcaggttctctatgtgtactcgcttcgcctccgccgatgcattgcgctccatgtcgagcagccgccggtagcgtatgacgtcggtgtacgagtagtacatgagacatagcgccggctcgccgtcgcggcccgcgcgccccgtctcctggtagtagccttcgacggacttgggcatgctgtggtgtatgacgtagcgcacgtctgccttatctactcccatgccgaacgctatcgtcgcgcagatcactttatgcctatcagcgacccagcccgactgcacggcctctctcttcttatcactaagaccagcatgatacgcgcccgcctggatgcccgccttgcgtaagtcttcgcacagcgtctcgcactcgcgccgcgataggcagtacactatgccggagacgttcatgaacttttccttgatgatcttggcgatctcctggttgacagacttgggcttcttctccacaacttcgtacttgaggttcggccggttgaagctgcataagaaccatttgcaattcgtcaccttaagttggtgcaatatgtccagtctgacccgtggagtggcggtggctgttagtgccatgagcggtgccctagggaacctttctcgcagtatgaataacttcttgtagtctggcctgaagtcgtggccccactgggacacacagtgggcctcgtctattacgaacctagcgatcttctcccttgagtacagcgcgtccaacatgctctggaacttgggggaactactgatcttctccggagtgacgtatagaagcttcagcagtggctccctcattgacagcttgtggtagatctcgtcaacttcggatagggagacgtcgcctgataggtgggcggccgggatatccaaagacaacagcttattgacttggtccatgatgagagacttgagaggcgagatcacgatggtcacccccggagtcaggatggcaggcagctggtagcaaagggatttaccccctccagtgggcatgagcacgaagcagtcgtgtcccagcagcgtggcgttggccgcctgcagctggttggggcggaacgagcgcagcccgaagcgctcccggagagcctccatcatgagcgacgagtgagggtaggacgtgccgtcgaattcaccagtaatcccatcattcttggtgccgactgcgaaatcgcccattccttcgtatttactctttttcttttctttcacaactgacagttccatcaaatttatcactttttgctcattattactggtgtctagcgcgtccatttcttcttcaaagtcttctatcctgtattcgggccagccatcatcatccactggtattactttaccattcaccgtctgagtattgggaagggagtctgacaatggcagagaatctgttatattgattacagagctctcaggcaaaatatctgcctcatcatcaaagtttatgttgatggtgtcttcttcatcatcataatctggttctggctgttggactataggagagactattgtacaaggtttgttgcagttcatcaaggaagatttactcagttgcggtggctggaactgaacagaactgttgcacatcggtgccacactagtggttggctgttccaccattggtttaagtttttctgtggcgttgcggagacgctctaaagtactggacggcgcgtctcggattggcgtcgacttgtcgctaggtccttctatcgtgagtcgcgatggccttttgaagacaaatttacctttactcttattctgattgcctgatacatcaagttctgaatgtgactgtaaggttttgtcttctattcttgatgtgttaggcgaaaaggtgtcaaatgacagtgattttttggccataaggtctgaatatatggttttacttggccccgcgcctttattgaaattgacgaaatctggtgttgaagtgtcgctgttggttgcaggttcatcatcaaatattggctttttccctggaatttgactggactctagatcgaaatcatcaatatcatcatttatgtacatctgtgaaggactgtcatcacagattgatttcttcttcttgttcttttcactgctgtccagctttaactttgatactttcttatgaattccatttggactttctttttgaataatgttctttaatttactacctaagtttttcattctagtatagtactttgaatcaaagccaggtaacttttcttttattgaatctgggattctgtcaaaggcattacttattttctctagtaattcaatatacatcattttgcattcatccttatcatcagagttcagtttttctccatctgaagatcttaaagctggatgatttgaaatattatttaagaagtctccaatactctcatctagtttcaatttcctcaaggagtctcttcctttcttcgggctcactttgctgggtgtttgcagtttcttgctccctccagcctcagtatgtttaggctttggtgggcttggagtagcgctgattctgattgatcggttctgttctttatttggtgttggagttttacttttgatttcatgtatgtcatcataatccacatccatcccatcaaatatgtcattgctatcattattgaatggctggtctctctttaaatcatttatattgttgctatgtggaatagaccttgatgcttgagaagtataagatgttgtagatgatgtagcaaagccactgttatcagtagctgtcttgaatggtggtgtccatggtttatcagtagatttggtcttgaaagtgaacttggatgactttgtagcagcaggcttagggctggatggagaggcgttgcgagaatctttactatttctcgtcacaaagttagccatcgaaaattgtttggtaggtttcttcgaagccatttcattagagatacttaatacacttatggcttttaaccgatagaaattgttcgatgtcttatttgtagagattttctaaataaactcaaattatcaaattccggataaataaagtttttg

SEQ ID NO: 1197 - DNA, 758 bp, Plutella xylostella
ttgaaggaaaacttgtttatttttttaatagatcttacacaaaccttgatacaaacaagaaatttataggttgtagatagcatagtacttacataaataattgaaaccaaggatatattgcattaactttattagcatctacttatttatacatgttatttgaccaccatgtttcttcttcaacactctgccttggtctggttggacagcgggccgtggcgcctctcccagatcatgcggtgtttctgcttcatgtacgctttcctcgcgtcaccgtaagcaccaagatcaccatatttgatgaaccatgcttcctctgcatccttgtatttctctagaagaggtttgcaaactgtcaggtggtcgggcctctcgtacatcatgcagtcctcataacggtgtcggatgatacccaagatctcagagtcaaccattctatcacgtttgaactgtagatttgcttcgaagtcacagacaacatcgtcggagtggcattggtcgatggtcggtacgcggcggaactgctggtgataccacggatacttcttctggtttggttccacaacagtctctctgaaccatgtcactggagcatccacagttctgaacactgcatccataaaacccctgaaaacattgttatcaccttcctccgccaccattttcagggaaaaattgtgaaaattgtaattcaagattgaaaaatcaagaacaaaatgttgtgtttgacatttgtatgtcacgatgacacaaaaaca

SEQ ID NO: 1198 - DNA, 1412 bp, Plutella xylostella
atatgacagaacgtattataaaagttgaaatccataatgtatatgttacacaaaacaactagttcttggtgggctcgatcgtttctcctccttgaatctgtccccagccaatcaatcgccaatggttttcaactcttctgctgagcgcgactttctctccgatttccgtgcacacagggttggtgagggtgattttggccaaatcggccttcgtggcgatcacccgcccgccagtactgagggagccgatgtttactagcaggatttcgttcctggtcaatttctgtactttggccgctttcttgtctccttcagtgcggactccgagcaacctcttcagcagataatacgacacttcgagcttcacgaagattcctggcagagcgcccacggccccgagaacctgtccaaccagcctatcagcgcggcacagcgtgggctcgatcttggtgcccactccgatgagtcctccgggcaccgcgtactgcagctcgttctgttccgcgaatagcgacacaatgcgcgagaagatcggccggcaggtcagcttgccgtccgcgtccttgctcactaggcccggtcgcacctcgatctccatgccgacggtgagcacgccctgcaggatggagccgccggccacgccgccgcgcaggtcgtccacctcgcagcccggcttgttcacgtcgaacgagcggatcacgatcatgcgcggcggggacgtgaagtcgcggagaggcaccgggatcttctttgttatgtactcgcagagcacctcaatattatatttaagctgcgcagagatgggtataatgggcgcgccttcagccacggtgccctggacgaacttcacgatctgctcgtgttgctccttcgcctgcccctccttcacgaggtcgatcttgttctgcaggatcaggatgtgcttcagcttcatgatctcgatggcggctaagtgctcgctggtctggggttgcgggcatgactcgttgcctgcaataagcagcagcgcggcgtccataaccgcggctccgttcaacatggtggccatgaggatgtcgtggccggggcagtccacgaagctcacatgcctcaccagctggaagcggccggagcacgcgggccgcagacacgggaagttgtcgtctttgcccgaagaccccgagatgaagctggcgggccgcgggcatttggggttgtcgcatttgtagatctttgcgttcgcgtaacctgtggtggggatcggatggtgtttagatggtgatggtgttctctgactaaacttacatagctgctatgtttgtttaggtagtataatacagggtgttgcaaaaagtaggtttcggcttagtgtaccctttttacaacattctgtatactaccgtattcaataggtataatatacctttttatgt

SEQ ID NO: 1199 - DNA, 803 bp, Plutella xylostella
ctcgtgctcacgtcccatatcttgacagtcttgtcgcgggagccgctggcgaggaagggcccggcgtggttggcgcgccggttgtcccccgccgcctcgttgacggcggctgcgcacgcctcgtgcgcccacgccacgcactccaccacgtgctcgtgctcgcgcagctccatcttgcactcgctcgagtcggcgccccacacgcgcacggtctggtcgttggagcaggacgcgagcagcgcgccgtccggcgacacgcgcaccatgcgcacccactcgcggtgacccttgtacgtcttcacgcagtagccagtagccacctcccacgccttgatggtcttgtcccgactggcggagtacacaatatctccgctgggagagaaggccacggacgacacgttgtggtcgtggccgtgcatcgtcttcacgcactcgaacgtctggttgaagtcccacagcttgatcgacatgtccgcgctgcatgataccagcagcttcccgtggtggtcgaaggcgatgtcctgcacggagtccgtgtgtcccttgagcgtgcgctcgtactcgccgctctcgaagtcccacaccttgatggtggcgtcctcgctcgacgacaccatcaggctgaacaccgggtggaatattaccttggtaatagtggcgcggtgtccggtgagacagaacttctctggcgggcgcgggatccactcggcgggcgtgcgcttggcgcgcgtcggggcgccctctatgaactccttctgcgcctccgacaacttcgactctagctccatcaccttcttctgcag

SEQ ID NO: 1200 - DNA, 2601 bp, Plutella xylostella
aaatttgcgataaacacatttttggttacactacgacctgtttcaggttaactctaccctttttgcaacactctgtatataatagtgtttgtcagtatgttttgcacattcgcaacgcatgtgtttagttctacattgttggcctttgactgcaggagtgtctacggctaggcgggcgcggggtgaggcatgaggcccgggggggagggctccttgctgtccttgctctctcgcaccggttccttgccaaccttgtctggtcgtatggtggatcccgacatgatagcctttatgtcatccgcgtctagggtctcgtatttgagcagtgcctcagccagagcgcggtgttccttggcgtgcgcgcgcaggatcgccttggctcgctcgtagctctccgacaggatcttcttgatctctttgtccatcagttcagtggtggcgggcgcgggcggcgcggcggcgggcgggtgcgtgcggagtcccactgcatccgacatgccccagacggagaccatttgttgagctatggacgtggcttgggtgaggtctgatgaggcgcctgaggtgatcttgtcgggcccgaagaccagctcctcggcggcgcgcccgcccatcatggagtccatcatcgccagcagctgctgcttcgtcacgtggtacctttccttggagggtatgtatgccgtgtgtccgagcgacgaccctcgcggcatgatggtcaccttgtgcagggggtgggagtccttagtatagtatgcgacggcggcgtgccccgcctcgtggtaggcggtgatggcgttggcctcctcgtcggggaggcgcgcgcgccgctccgggcccatcagcaccttatcgcgcgcgtgctccaggtacttcatggtgacggtcttggcgccgtctattgctgccttgagcgcggcctggttgaccatgttctcgaggtcagctcccgtgaacccagttgtaccgcgcgctagcaccgccggttgcacctcaggcgacgcggccaccctgctcaggtacatctgcaggatctccagccgcccctcgtagtccggcgtgggcacgttcacctcgacatcgaaccggccgggccttaacaatgcttggtctaaatcctcgcgtcggttggtcgctcccagcactatcaccccctcgttctggtggaaaccgtccatttccgagagcagctggtttattgtctggttggcgtacgggtgtagaacgctgttggtccgcttggcccccaccgagtctatctcgtctatgaatatcacgcacggggcgcgctccttggccgctttgaacaaatcccgcaccctcctcgcgccctgccccaccaggatctcgtcgaactcgggcccggcggcgtggaagaacggcacgcgcgcctcgcccgccaccgcgcgagccagtagcgtcttgcccgtccccggaggccccactagcagcacccccttgggcagtttgccccctagggaggagaacttctcgggggattttaggaattccaccacatctttcagctcctgcttggcctcatcagcgcccttcacgtcgtcgaaggtgacagagatgtcctcggggtccacctccacctggttgcccagctggatcctgctgaagacggtcccgctgacggaggccatgaggctgacgaagatggcgaggaacagcacgatggtgagcagctgctgcaccaccttcaggtacttggaggctttcgtgccgcgcgcgttgtctgggtgcgagcctgccaaatacccctcagcgaaggcaatcttgatcttatccttttgttcgtgtgtgagcggggagtcttcgttcagcagcttgtcgagacgcggagccacctctggccccgagccgggcttgttggatggattatccactaggttcagacgcagtctattaataagattagggttcctcttgagatcggcatccacccctcgctcggtcttgaaccctcgcacctgcacgttgaacttgaagctattctggcgcaggctgctcgccagcagaccgacaaagttctcagtgacattgaagcgaccccgtctgacatccacggtgaccgttggcggtgagctccaaccatttttgtttttttcaaaggagtcttcagatatgaatgaaacctttttcgctgatgtgagtgcgctcggccgcgtgcggctgagggtgacggcgcggaggtccacctgcctcatctctttcaatacatccttttcgaagtttcgaagacattcgctcagactttcttggcatattgttgcgtcatacgaagcctcctttctcttcacatggttggttttctcaccgcgctgctttctttgcttgaatagactcgcgtaacgagacgacaattggtttaaactaactaggacctggttttgggtgtttatagaattcaatgaaaacatgttacatgtaaataaactgtgtttttcttcaagtgcactcgaaaattttgtaggctcttacgtcaaacagaataatatcagcaaaatatggcgaaatgccaataaaaattgttgagtttcgtgtcacatcactatcaccagtcacgtagactttacacagagtattttttcaagt

SEQ ID NO: 1201 - DNA, 625 bp, Plutella xylostella
ggggcgtgggcggcgcgggcgcggggcgcgacggcggccgggacggcttgttgtccgacaggcccttgatctgcagggactcggccgccttcagcagcgcagccagctggtcctgcgagatgttcacttcgccccggtacatgtagtccatcatggctctcagttctgcgtacttcacgtcttttaggatgattattggatgcttgtcgaattgttgtgacaggacattctcgaagtatggactgcacgcagagagcacgaccttgtgcgccttgagcgtctgtccctcggcggccagcgtgcagtccacatgcatgcccttctccagcagcgtgtcgaacaccgacaccagtgtggactggtggttgttccagcgcaggcagaactgctggtcgtcgtccatgatgctgccgtgtggcccctgtcgcgcccgcccgcttgactatttcattaactaaatatctgaacttttaagcagaattttcactgtattatggattatcactaacttaattatgctttaacacacccgccagctttcttgaacaaaaacatctactttgctatgcaagtttagagaaaggcacctctaaaaaaaattaacgaagcaagttggaagcgacgc

SEQ ID NO: 1202 - DNA, 2453 bp, Plutella xylostella
tccgaaactacgattttagtcatatggagtgaccccccaggtcattcgtaacttcgaggttagtcaataaaaaaagacctaaccaactctaggaacattatttcggattaaattataaaaattggcaatacttaatgttcgctctatataataggggaaattgactattggttagatctccttgggattatctagattattatcaggaaatataatgatttaatacacacataataaggaccaatacagcgtccgactatggcctcataacaaaatgcacagtaaacaaacattcgcccaccaaagtcccactacttcgatttctctaataagtatgcaaacataaaaacgagatcttattgtaaaaaataacaaaattcgattccaacaaataatcataacggaagattttttagtccatcagactttaaagtttacacattttcgtagtagatatcatttggcaaatatggtaggtaggtccttcattcagtttcataacacgatgaaggaatatctaattatgcagaaaaatatctgtacaaatttctgaagtagtccacgggaagagtgcgactctctcaaacgcaagattccatcaggcgattctttgttgacttagacacatacaagatctatttccacttcatttgtacatttcattagtcaaaaatggtcacctgtgaatcgagcgtaacgcggctgacccacattataattgatgaattcacaaacactaaacatctattagttataataataatttaagactcgggatccgttgatgagaccgtcgctgctttgctcgtctcgcagctgttgtagaactggctggcggtgtcggcgtcggggaagcgcacgctgacggtcttgtccagcggctggttcgtggtgtagtccgtgcccgaccacgtgcacgagtcgccctccatctggaagtgcgtatcagtgtgtatcagcatatccgccaatatctccccggtggcggcatccatcaccagtatcttgggcgagtagagctcctggtcgtacatgacgtgaacttgcgcctcggggcagcgcgccgtgtggtcgccctgcgagaccgtggccgcgccttcgcaggagtagtaggtgacggcgtcttcgtcctcattataataatcctcgtaattctcatagtcctcataatgttcagcatcataatcatactctgcattcacttcttcctcagccaccacattctgagccccatcagtactatcctgggttcggtcagcactactctggctattggcagagaggtcagcccgagagtctgtttctagatgtttcggcagtcggagtggcgccactttctcttcagttggtttgctgccagactccttgctctcgcgaatcgcttgggcggcggctacttgtagtttccggacacactcgacgatcttatccttgaagctagtagccaggtcgacggtcttgaacctcacggccagcgtctcctgctcgccgcccgcctccgcgtagttcacgcccgcccacgtccacgcgcggtccgagttcttgagcggcagcagttctaggtccatgaagagcagcatgttgaggactgctttgtgtacctgttcgcggcgcagcagcaggcggtaggtgctcctggcggggtggtgcagcagcttcagctcgcccacgccgcgctccttccactcgcggcacttctcgtcgtagcggtacagcttgcagcgctcgccgaagatcttctcctcatcctcctccccagtagtgaccacaatcttgtcaggcagcggcacgatgggttcataatgcgggtcgtactcctcatcagcctcctcgtccgcggccgactcgtcccgtgcccgctcctgggccgcccgctgagccgccgtgaacagctggctgcccgcgccctcccacttgaagttgtctgttttctgtgttccaaatccgggttcgctagacgacaacgccgcgaagctcagagtgttatccactttgaaagggccgtccttatccgccgctttgttctctttcgtctcagtcttgttgccgaacaggctagtcgtctcattcttgatcagatctgcagattggttcgctccggagccaaacaacgattttccacccgagaagatatttccagtgctgttcccgaatagagaacctccacttttaccaaaaatgctgccgccagtgtttgaattattctgactgggtccaaacaaactcccttgcacagggttgctgaataaattaggggtctgagctgggctagagccaaatatggactgcactggtgcctgggtgttgttgcttgtgttatcaggtgcattttcgttattcttattcattccaaaaactttcttgtcctcctcagacgaagggctgttagtttctggctttccgaataagtttttgattccggcggcgaatgttggcttgttggcgttgttggc

SEQ ID NO: 1203 - DNA, 2802 bp, Plutella xylostella
ccttgttcaggtccaacgcagctgcactgaagccagcggtaaccgcgggggcgaccgcgggggcagcggcgggggcgggggcggcggcgtttggggtccagtctttcccggtgagcgttttgtattccgctttgagactgaggaggacttttacctcagcatccacactagccttgtccttcttctgcgccttggcctgtctcactatgtctccctgcgcggcgatcctggccagcaccgcgcccacggcgtcggtggcaccggtcacggcgggagcggcgggggcggctgggggggcgtccggcttccagtcctgtcccgtagcagctttgtactgggctttcaactccagcagtgacttgacagcggcgtccaccgctgctttctcagccttggcggccttcagcgcacgcaccgcctcgccctgcttggccacgcgagcgtgcagctctgcagcgctagatgcggcggcggcggctgcgggaacagcgctagatgctggcttggccgcgggggttgcagcggtggcgggtttaggctgtcccggcagctccttggcgtgtccatcaggcacgtggaacagcacgagcggggcggggcggccgctctgcggggaggggggggagggcgccgcgtccactcggaagaaccctcggcgctgtatctggatgatgtcgccttgtttgacggacgcgagggccggctcgcctagcatcgggatctcccacctagtctgatgcccaatgtactgcttgaagtcttcgtctttgcccaacagcggcttcgatatgatatggtcgaagtacacacagtaggtctcgactgccggcgatttggcggtgtctgccagccaggtcaccttgaccgtcttcttgaagtctttgttatcgaggttgggggtcccgtctatactggttattgtgccgtcagccgatttatgaatcttatcaatcatgacattcccgtagtagataaacgtggtattctctccttccttcagcagcttggcgtctgattggtcgatgagtagccgaggcgcgacccacacttccttggtaccaatattctcgttcttcggatgcagaggcactgttagtgtggactcgttgacgcccttgaggttcactggtacgggggtggtttctatggttgtgtagcggggcgcgatcgggtcgatgaccttcttgttgatggcccagatcttgtcccactccatgaagacgacggagcggctggagccctgcgcgcggatgaactgccgcagcgcctccactgtcatgccgcgccggagcacgccgcgcaccgtcggcatgcgcgggtcgtcccatccatctactaggccttgttcgacgaaccaagtcaactttctcttcgacaatactgtgttggtcatgctcaatctgctatactcccaaatgtaaggcttcctcagccccaaggcgtcaatgaaccagtagaactgtgggtcccggtcgtggtactccatggtcctcagcacgtgggtcacgccctcgatcgagtccacgatcgggcaggcgaagtcgtatgttgggtacaccttatactggctgccagtcctcgggtgcacctcaggcttgcacctatagatcgtagggtcccgcatgcacccgttggccgacgccatgtcgatcttggctcgcacgcagcatcgcacgccgctgtctgacgccttcttcatctcttcccagagctgcaggttcttggctacggagttattcctattccggctctccgtcttgctgtccctctctgccttcatctgttcagccggcgtgtcgtccacgaacgccttcccttccttgatcagctgctcgcagtacgtcagcatcaggtcgaagtactgggacgtgtgcgtgaagagatccggcttgatttccagcatttccacgtcaccgagtatcaccttctcaaactcggcgttctccttggcggggttggtgtcgtcgaacctcatgatgagcttcccctggaacgcctgctggtagtactggttcagcagagcagccttcgcgtgaccgatgtgcaggtaaccagaagcctcaggcgggaacctgacgatgaccttgcccatctcggcgtgaggcaggtcgatgaacttgccctcctgctgccgccccgcgcccgcctcgcccgccgctggggacctccttgaggaggccttgcagatgttctgctgcacatcgtcgggcaggtccttgagagccttcgcaacaggaggctgtgcctggatcagcttcatccagcggaggatgttcttgggcggggtggccttggagatgtccttgaacttgttggatacatgaagtacactgaagacagcaagatcagacacagacagtgattctccaaccaggtaggtaagtggactgagggttttgtccagatattccaccgatttgggcatttcatcctccaagatcaggctgaaggagagccagtggttcattgtcactttctgcaggggaccggctgacttgttgaatgcattctcaagcaaccttatcaaatcattgctggttccatatgtcactggttttttactgtttggaagcgtcacggtagattcacttccccaagccacatctatgctcttcgacaaggacctgtagagttctatagctaggaaaccacccaaaggcgggttagccttgttacaggttattttcatcgtggtctttcttgtgctagaggtttttagttatttcttcctcagaaaaggaagtaccgcccggaatttcgagcacacacacgaaaaaggaaacgatgcagcgtgaacagctg

SEQ ID NO: 1204 - DNA, 928 bp, Plutella xylostella
gtgccttaattaacaaacactattatcacaatttatcgtaatacacagtgtaaactgtagatgtaaacatgaacatagaaaatggaacataacataaccacaaatggaatacaaggatggatgtgcgctgatgacttacaaattaacaggttatttaactatcttcctcttcaatcttgggagccaagtagtagcggatgtggccgatgtcctgaatgcggtattccaccacaagcgggacgtcagccgacatggaaagttgcacctgagggctaagcgacgtggccttagtgaagtagttcaggtactggcaggcgaaggtgagcgtgacgggctcctccatctcgatgaccaccgcctcttcctccttgtccacggaggcagtctgcgccagcttcacgttcgcggagccgatgtcgcccgtcgctgagaactttactccttctttagtgcatgagatgaccatggattcaccaaactgtgagaggtcgcggcagatccgcgcgaactcagcactcggcaggcggatggtacagctgtattcagtctcagggatacctaaatgctccagatctaagttcataagtttcatctcatagtcagacactttctcctggttggggctctcgaacacgaatgtgacagtgtcagcgttgtcctgcgccttcatggtcaccgtgtccttgtcacccgcacacttcaggatcttggacatgcttcccaagttcattcccatggagatattgcggtcacaccgatatttgtcaaaaccatcagctcgaagagtcagggacaccaaggaaacgtgagagttgtccatagcctgaagttgaatcccattgtcatcacaatcaaatgtagcttgtgtgaggagatctttgatggcttccagcaccttcttgaggattgagcttcggagtaatcgtgc

SEQ ID NO: 1205 - DNA, 517 bp, Plutella xylostella
ctttttttttgcggtttttttgtgttttttattggttttagcttagattaagacctaggaattagcttgaagacttcaggtagtctttgagcacgtccaatgctggtgtctcctcaccgaagtccttgataactacgcaagagcatccgacgattttcctggccttgccgtctttgtcgattttgcaaagtccggcccattcaccgagcttcttgttgttgtcgaccttcacaagtgggatctggtgttcgttgcagagagcctggacaagcttcttgtaggcagcctcgtcacagttctcagcaagcacacaaaggacagcttgcctcttgtcaagagccttagcggcctcgtggagtccatggacgagtcctccgtggataagggccgtcttcagaacctcctgcagggctgtgttcacgtccatagcacctccgctcaagacggggttggcgggcacttcaacttcgacatcagccatggtttcttgtgattagacgaccttgcgtaccggaaa

SEQ ID NO: 1206 - DNA, 2902 bp, Plutella xylostella
cctcaacttattgacaaattttgaaaatcacagttatttatttttgacatttctgttttgtgtaatcgtgttactattacaatacaacaggttgtcatgtttatgggaaaatgggtacaaaatggtgtttcactttaaatttatatattggccacagtacattatattattgagtaataattacattaataagataacacatagatcggattcactcttttaaaaatcatcaatcaaagccttgacagtgacacgataaaaggcgaatataatactaaaggacaaggtaatagggttcagagctacataacaagtgagcaagatcgaggcgagaacaaaaccgactaatgtttttatcacgaagcaaataaacacatcaaaaccactagagaaaatatacaagtgaacaaattagttatattgtgatagtaaaaaagcacgaatgtgtaagaaacaggtaacacaaagatgtcgggaaacagtttttatggacataaaaaaaatatataaatggcgttttcctccttcctgcatttccacttacaatttacttagatacattaaaatggtgggttggtacttcgcgtttcaaatgaaaatgggaccttcatttacaactgtacatggcggcactagcacgcacgtactacttatataaaagtaatgtgatgtacgcaatacacagttcatcataggaataaaacttctaataattttatacagaccgtaaatattgcaggctccgcgatcacattatcatttaaaacccgttgtagctaatatttatatacaataccaacgattttaatagactttcttatcacgcgagtcacctacgtgtgacaaggttctaacgagagccgggcgggctccactcggtactacagggtcccgcgggactagtaatcataaaataaacggctccacttagaaccgtgtcgcagtactttttacacctttattgcattcaattaccaatctactgcaaacatacatattgttcaaaagtgctacctttaaacacctaccaaatacatgtttcatcgaatagggaaacgatataggatacaatttcaccggccaatcagaaacactccgtattcataaatacaataagccaatcaattttaataataataatattttgtttaattcttaagacatggatagatttagacatgagctttatttcaaatatctagttaataatttatacattacaacataacttgcaaaacaatgtagacaaacacacttgactccaagcatagacgcataccggtatatctcatctaaaatacgaaactactcaacgcgcaaaaagcgtcctttacatcaccgtaacctaacacatgaccgcggcactaactagccgcgagggaaaaacaaaattaggatcgaatatcgtcttgagatcaatcatagtaaacgaaggggtttgaatccgtggattctcttatttacgaacacatccgccgaccactgtcactagatggcagcacgccacaaatcacaatcactgccatctttcgacggctctgcgaactagactggcagcaccaaaatcacaatcactgccacctagcggcgttaccccgcactacgtcatcactcggcgtagaactcaaagatgtgtgttccttgcgatgtgtctttggtatagaggtcgctggcggcggggcactaggcttgcttgacgcgtttcctcgggggccctatgggcgggatctgctgttgttgggtggcgagcgcgcggaacgcctcggctatgaggtgcgggtgcgacgagatcatgttcttccagccggccgtgtccatcacgtccgttgcgtgactcgtgttaataaagtcaatggtctgcgccttgagctggtcagcagaatgcaggtcggccaacaccagcgtgtccgccgctgactccacggacagtgactgacagagagcttcttcgcacatcaccttgagccgctcgagcgcgtatttgtcggcggcggcgagcaggtcgtcggccatcttgtccaggttgggcgcgcgccccgtgtagatgaagcggagcatctcgcgtaacacctcgtggtcgacgtcggtaatgtcgacgcggttgcgcttgcgctcctccatctcgtgctcgaacatggccgcgaacaccgggctccgcgcggccagtatcgccttgtgcgcctggaactcgcggccgccgactgccagcgtcacgtcggagaagcgctcgttgtcgaacagcgcgcccaggtcgtccgacagccggcactccggcaccttaaactgtacgacgttgctctggccgctgatgttgatgctgtcggccaccacggacacctcgcagaatatcgtgagcttgtcctcgggcagcagtccgttcgcctcgtctagtaggaagtctcttctgataaactttttgaatccccagtccttgccctgcacgaatctgtaggcgcgctgcgactccatcgcttttgtctcttctctcttcgcgttcagtatggagaacttgaacttggcacgcacttccgatttattacacgacactaacaacagatataacgataggtagtctttgctctcctcgtctagtcctttggggttcactcggaggcaccactttagtttgtcactggcacccgcggagaatgtcgatgattttagcacttcacccatctcttcgcgacagaaactgaaattgtttatcgtccacatgtagctgaatttcaccaccttgacctgtgtaaagcaccagttctcggcgacgggcgtgttcccgtcgtgcagcgggctgggcacgcggctcacggccatgccgccggcgccgttggacgtgacgcgcgccgactgggggggcgccgccgccggcccgccgccgccgcactcgctgcccggaccgtgc

SEQ ID NO: 1207 - DNA, 3342 bp, Plutella xylostella
ttgcctttgttataacatagacttacgtaatattattacatacattattatggacttgtttcacgttaagtagttatggtgaaatcataaaaatatagtaagtaattaaacataacatatttttagctactaaatacattttgaccatcataacttgagccttagcagagaggatacataagaaaaattatcattaagtaattatttccctagtaatagactaatgctatacataacgttatggttattaggctcaaggtcctttgatcttaaacttcattgaactcaaagattgcactgaaagagcatgagtatagtgacaagaattaaagattatattatactaaataacctccttactgggcgtggaaatgccgagtgcctcttcataaccagttttgttcgcatgcttatctttctttgagggcttcttgtgtttggattccttatccttgtcatctttcttggacttcttacgcttctcgctgacaggagtcgtctggtcggtcagttgctcactattgggtttgtccccgccttcttccacaatcatgtaatcagtattaattaagtcttcctctacgaccttctttgttttcttagattttttcttcttgtcgttctttgctgaaggctggtctgaatcactcttctttgacttctttttcttgggtgttttcttcagctggccgctctctggtagcgggtattgctgtattcttgtcgccagcaactcttcttctcgtaaaggtaggtcgaggtcgaggtcgagcgcgcggtgcggctcgtcgcgcggcggcggctcgtcgtcggacgacgccgcgccctcgggcagctcgccgcccacagacacctcgggccgagcggttggcgacacatcgtcatcctcgctgtaggagtcggcgagtatggacttctctgctttcttgctcttccgcttcttcggcttcttggacttcttgttgttgtcgtctcgccttgtcaggtacttgtcagatctcttggtgtgtatctgcagcggcacctcgagcgcgatctcggcgacgggcgcgtcgtcctgctggtaggagcgcggggagccgtccttgaggtagtgcgggttgttggcctgctccgccttgcgcgcctcgcggagcatgtccagctcgtcctgcgtgaactgcgcgggcgggcgcggcgcgggcgcggcgggcgcgaacagcggcggcgtggcgtcctcgcgcgcctcctcgtccgacgagctcgagctgtccgacgaccagcccgccgcctgccagcgctccaggtctagatcgggaggcataggtactttcttctgtgctttaggcgcgacgggtttcagttctccgtcgaacagttccgccagctcctcgatcaggccgttgctgaacgacgccgccgcctgctcgccgttcgctagctcttctagagggtccaagccattgctggcgggtatgtccacgacggggctgtccccctcggtggccgcgagcgccagcgccagcagcgcggcggcgtcgtgcgcgcgctcctgcacctccatgtcctcgctgctgagtaggcgctgcaaccccgacagcgtctcttgcaggatctctatagccctagccttctccccgcggcgctccttcagccgcagcacccgcgcgcacagcttgagcgcgccgtgcacgcacacggcccgcgcgcgcgccgcgccgccgctgccgcccgcgcagagtaacagcggggtgattgacgactccattacatcctcctcggtggtatactcggacagcacgtaggcggcggcgtacagcacctcccgggtggcggggcctggcgcgcccgtcgccgccgcgcgcacgatgctggcgcactcgcgcgccgcgaacagacgcacgccggacactcgcgcgcccacttcgagcagctgtgacgcgattagtgacccatgcttggcgctggtctccatctcggtgagctcggccagcacggtcacgtaccactcgaagtcgctcacgtgctggtagttgttctgcgcgcagatctccaccatgcgcgagagcagctcgtcccggtacagggtgccttcagcgcgctccatgtggagcatcagcttcttgacgatctccattaggttcttcttggataccatgccatacagcagccccagcgcgcgcaggcggatggactcgtccttgtcgtcgagacacgccagcaccaggtccttgtgcgcctgcaccgacttcgggtgcgacttgaggatgcgcgacatcgccagcagacccaggtacttcaagttttgatcgctgtcctcgatgagtatccggagcttctgcacgcagagctgcacggaggcggcgtggcccggcatgccgctgctgatgctgatgagcaccgcgatcaccgtgttgatgcactcgtacaggagcgacatggccgacgtactatgtattaaattagtcaatggttctatcagtttcttgccaagacggggctctaatggggttaaggcaccaaacagtttaataatcttaattaacatccaattattagtggaagtggtcatgagtttgaagaacacaggtgcgagggacaggtagttcttggggttcttccgggcgagctcgcacaccacattcacagctgccgactgcacacctggatctggatcttctagtttttcttttaacttagggaaagccggccgcaatgcttctggatacctcaggaacaccttgtacatcatcagcacggctttcattctcaggtacggtttggttgaactcatcagtgtcatgatatcattggccaggtctcgtgcgaggtcatgggagatgaagcagctgagcccgctcaaggcaagccctgcttcatattggttttgagcattcaggtctttccgtatcatgttggtggtgagcataagaagttcagagtcagcgtgaaatgattgactagcagctaaatatccaattctcttatatgtaaatttgtttgaactcattacttctataatattaaaaatagaccaggatatgtcgtatcccagcatttgtaaataggtgagttttgcaacggcattagctttcactgctatgttatcctgccttaattcgacttttatttcttccatacactgagctatgtatttcgcctcgttatctttgttatttcgaatccctcgaactaaatcactgagatttttgtcgaacatcctctcaaagttgcctttcactttttttaacgccattttcactaaaatatagataaataaagaagttgtacatgaactaaactaaatatttatccattactgcagtttttggaaaattctacgatttttctgactgaacaatt

SEQ ID NO: 1208 - DNA, 1403 bp, Plutella xylostella
gctatagtcactcgcccttgctccatcacctcgtgtatggcggtgcggtccgcgtccgacatcttgtcgaactcgtcgatgcacaccacgccgcggtccgccagcaccatggcgcccgcttctaatctcctgtcgccggtctctgcgtcggtggtgacggcggccgtgagcccgacgccggacgagccccgccccgtggtggtgatggcgcgcggcgccgtcagaagcacataacgcaacagctgagacttcgccactgatgggtcgccgatcaatagcacgtttatgtctcctctgagcctagttccattaggcaggattttctccattcctcccaagagcaggcagagtatagccttcttaatataatcatgtccgtggatagatggcgccagtgacttggccagcaagtcgaacatgtccacagtggacctcttggcaagacgcttgcacaacttgatgtcttcgcgagtcacatttagattcatttctttgttgatttgcgttacattgttggctataagaattgtcctgaaggtgccagcagtaaagctgccctgcttgttgggcaggcagcggtaattgcccacaatctgcacccggtcccctggcttgcagcggtccaccaggtcgtcatcacagaccacgtctacactgcgaggcagctgccccgccggcgctcgctccggcatttcctgcactgtcagggtctggtggtctttgtaccgagatagaccatactcagtttctagaggattgccttcatcatccttagtggggtagatagcagttgttggaaaagcatcaaatgaggtgagatcggtgtactttctctccatgaccttcttagtggcgggacagtagtgcacactccggaccacctttgggcggactagtgacactcgggtcacaatgccctccacacatattaagtttcctagatatctggaagtcagactcctcggagtgacatgtttgtttccaaagcttccagaaaaggcgacgaagaactcttcctgttccttagcgtacgttggatcaatggacgctacatactccttgagcgctttctggaatgctatctgctcctcaaaagcattctcaagcaaattttttgctctatccggattcttccttctaaggtcattcacactcaccataagccgctgagacttatcagcgatcatttgttttactctctccatgtaaatgccttggtcttcttcatcgtcaaggaattcaagatattctctctgtaaatctctgaggcgctggtcaaagtctccgtcctccattataaataaatttttagtttaataaaacacaaagaagacgatattttcacaaaacaaaattgacatgtgtaccggtattttggcgcgaaatttgttgttgtcaatttt

SEQ ID NO: 1209 - DNA, 5576 bp, Plutella xylostella
ccacatacacaaacaacttaaaatataaaaaaaaacaatgccttgattggaacgaaccatcttaatttattattcagataaaatgaatactattgtctaaaacttaatcatttccatggaacacacgttgtttacataaaatattattggatattattaatgccaaaataggtggcatcgataattatgattaaaataagccctctcactgaagccaaacggtttatttcgttcggggccagtctgaggcagtctggcctcgcggcgatctctctagcgcctaccaccatggtgatggagtaaggaatcacaatgaccaagtccaacagaacagcagtttcaccatcgaagacagtcatctcggaacacgataaaacagtttggcagaagaggttacacactatacggcgaaataaatacaaattccaaatacggtcttacaggctaaattaccatgttcgggaaaaaccaatcattattacaagatgaatttagtggcccgcctacacatgcttcttttggattctattccatcagtaatctcaaaaataaaccgaaacaaactataaacaaaacaattacaccgaaacttacaatcaattatcatacatatcaattaattcaagtggcattttaatgagaaacgtaatattacaatttacctaatgagactaattgcataaaatacctaactaacactaacgctaataaaaaatacacgtggcacttataaccacaaacaattaaaatataacagttttccgtcttacattgatatgtaacttcacttaaaacgtattgcatcgtttattcacaattacatcaggcattttttacgaacacatatgtaggtaccagtagagggttatggaaggcttatggcaaaattatgaatacccgtgaaaatatccgtccgaaccttatagttccatatcaatggacataatacttgttacataatataaacgaggactaccaacatcctactaccatccactagaggtcttgaccaaatcaaaacgtacttccgaaagtactgtaggactggtgttgtgggccaccacaatgtcatagtaaacacaaatgaatttcaaattgtgacgaatagtaatacacaggagtagctacatacatatttaaagtattacactaaaactatgcttcagtctttgtttaattattaggtcgtagctatttagaggagggcctcccgaccagaaaataatatatacacaatgtagtagatactgaaatacagcataccccatcacacgcgagtgagaacactcgccgccaactgtgtcccttcattcattatcattatcaacatgttcacaattcattattcatttcaatcattacattaataccgacttacattttatttgaattaaattttatataatagtgattatgatagtggctatactaacacatacataagagtatataaacacataaaataaacgaaatataataaagtttaaatacggaaaggtgtgttcgccattcaaactaaaatatagttttagtattttcggatcgaacattaaattaaaaagaatacaaacgttacatagaaaatcctataacattaccattgattaatatgcgttgattatattggaatacattgctttattatgatattgtaagttattattattgaatccttaaagtcgatgatacatacatacttagagtattagtatgcgggagtatattaaataccttgtactccctaataatattgcataatcattatatcaagataatataaacgactacaagttgttgtgtatgtaacacatacatactatgaatatagacacaaagtagacacgaactgcagatctgactcagacaacgactatgcatatggtttggcaggctatacgaaatgctgaactgttacgttacttatagacatacatattatggttttgctttatcatatctattataaactatagttagacattattgaaaatagttactgaatcggtacaattataattatttaaaatacgacatcataattattacaaaaaatgacagataagtaattgaaaataataccattataatgaataaaattaattaattatttaatatgtcagaagattatgattgaattaatatgtcagaagttaaaataagaattaaaagatcaataaaactattatgaatgtataaattaattgaataaaaaataattacgcattataattcaaatcagaattgaaatcagttttcattaaatgggccttagacatactaaaccttacaactatcatccacattttcagtaaattctttgggatcgggatgatgaatgaaattacaaatagttagggtttggcgtacgctagtgaccctcagctgaaatccactgaacacttccagttatgctaaatcggagtaaattgaaattgttcaccgtactgagtatgttaaacttaatctcagtacgtatcataaaggtaaagatacacttaactatcaattgttcatatgttccatgtgagtccataatggcgggtagacatctgacgtcatcgccaggcagcggtgggaggtctgctggactcacacgtcaaccaacgccgccacactgccaccgaaccgcgcgccgaagccaacactgaccaaagaccgtacaattcgtacgctgattgcgaaaatctacttaccaactacaaaccgtactagccgagtaaacataacggccaaaaacacggtaagaactacaagtaagtaagcaaattgatttcgcataaagactaggtttcggcgcgtccgtccggtcagtttaacagtgccacggcgcatagaggttgacgtagcggcgcaacaggcgccggttgagtcgatgctaatcatcgcacttgcggcacgcgccaggcacgtcgaagtcgagcaccagcagcttggtctcctcggtgccgttgcggctgccgacggcgcagatcagcttggtggcggaggcccggatgcgccacaccacgccgcccgagccgcccgagctcagctccaccaggttgcggatgaactcgccggtgcgcacgtcccacagcttcactgtgccgtcgtctgatgaggtgatcacgaagcggttgctggattgcaggcaggtgacggctgattggtgcttgttcggtccagacagcgtgtgcaggcagttcccggtgctgatgtcccacaccttcaccgttgagtcagcgttccccgacaccaggatgttggagtgtagctccatgccggaggtcagcgactggtggccgatgagcgtgtgcttcagctggcccgactccacgtcccagacgcggatggatgtgtccagggagccgctgactacgtgcactccgtcgaactgcaagctgtaaacgcggttggtgtggccagccagcgtatgcagacactcgccggtctcggggttccacaccttcacgaagtaatcgtaggcacccgacacgaccaccttcccgtcatactgcacgcagcgcacggcggcgagatggccgaccagaacgcgcagacagcggccgtccgggatcgaccacacgcggagagtcgcgtcgcgggagcccgacaccactctgttctggaagagatgcatgcagcgaacagtcgaagtgtgtccagcgaggaccttcagacactggcccgtcttagcgttccacacacggagcgtgcggtccgtggagccgctgatcacgaggtctcccaccatttgagatgaccagacgccgccagagtgaccgactagagtgcgcagacacttcccagtgatagccgaccagaccttcagcgtggtatcgtccgacccactcagaatcctgttcccgtagaactggaggcacgtgatgacgtggtcgtcgtggcccctcatgacggtcgggtggaccacagacttgtggagccagttgttctctatgaggtactggcgcatgtaagctgctttccatgggctagcggtgcgagggagggctcgaggcatcttcttgagcttggtgatgccgatgcgccggcactgctccttccatagcaggttgtcgtcggctaggaatctccaatatcggcaagtttgtgcggcgcgcagcagatccttcggtccgagatacccgaggacactcagagccaactccttaggaagcagcgagatgaagtcgcgttggaagagcggctctatggccttcatcatatggcgcacgtggccggcggcgcagcggctgatgagagcgtctattgcctggatcttctcggagttggaccacgattggaacctgttgagccagttcttcatctcggggggtccctggaaggcgccggccgagctgcagctgggcaggttccagtccgtgtccctcatgctcgaggacccctccccgcagaacttcttagccagctgaggcgtcgccggggggtcgtagcgcctcttcctccatagccgctcatcgttcaggtcttcctcggtttcgtcgtcatcctcgtgagatgagaggcaagtgcaccaggcgtcttcgtggacctcctcgtcagactcttcatcatcgtcatatcgagagtagctcggtgacctatgagtttgtgagctgctgctcccattgagccccaacagtctttcagcattggaagtggatggcactgtgaatgtgtccttcaaaccttcggaactgccgctacccatactagatgcattggagtttgttctaccgctgccatccatatcacaatttcccatatcatctcctttgtacaatttacctttgggatagtcttttatttcttgtgctgatgggccactggccaaaagtgttttcatgaaatcgtttttaaatactggctcctgcttaattccaagatcagcttcagcattgtttgaataatgaatagtccgagagtgtatcattcttttaattgtactattgctgtcttcgcattcatctgatttactacaccccggtaaactataatcattgtttatatttgagagtgtggaaatggtttctgaactagaggctaagctagagttggcactagaaagattcccagagaaatgtgctgctgctcctatcttggcggcatcaacaaccatgccagagcagtttaatatacgattttcttgttcaaaatcctccctctctaaatcatcaatcatttcttgtttaacgatcacattgcacttgtgatcgtcactctcctggctcatgtcttcatcatcagtcttgctctcatcattgctatcatattcaattttaatgttcccttcatatagttcacttctagaatgagaacatgatggctccattctattgtttttaatctgtaaagacagatttttttcttaattaatacatgagctgcagctgaattttatccgtagatgcctgaatcccaggtttgctgagtgtaatctcaccgggttgtcttgtaagaggggaacatttttattatttgtgagaaggaaacaaaacaaacactaagcaatttataacgtgcacactataaaaattatatttaatatttcatttcatcgagtctaaaaattaaaaactaaagggatgatttcagtg

SEQ ID NO: 1210 - DNA, 1826 bp, Plutella xylostella
gtttttttttgataaaaaatatatttttttcatataatacaaaaggtttaagtacaacattaacttattaaataccctgacatcaataatttatttaaatataaataagtattttggcaattgttcgtaaactaagttgacgataacatcatcacataggtataaggtacatggtaaggaattatgactacattacatctattgttagttctagagctaagggttagtggttggtaataataattatcttctgtatccgccgaagagactgtatcggatatgttggaaccaagacgttctcttctgcgctctcgctgcttctgcttctcttttgaattctatccagttgcgacgttcgaattcctcacgaggtccccatgattccttggggcggaatgaccgcttggccgtctcagcgcagtttccagttctgtatttgtacatggtcaggccgattgagatcggcacgaaggctacaccaacgaacagcatcatgtatccggaaacatatccagccgttggatagtaatagtcttcaccaaatttaagtgtttcagaagtagccaacgcgtacacgaacacgactatcatcatggcaggcataataacaccccaacaacatctccagtagaatgaagtttttatgcccaacatgtactcaatatccaggcacaagttctccaaaccgtaaatccagaatactccaataatttcagcaatagcacagaaaaggatgaggaaagttccaccgaagtaatccaccaactcgaggatgtattgaccaccaggtgtaacgtaaatgaggccgacgccaaatccaatagtgcagcagaaggcagacatgaagatagtcttgatgcgagggaacgcatccaacatcacagtgttgatggtggaaagcaaagctacagctgatccaatacccagtaccgtcatcatcaagaagaatagtactgcgaacaactgtggttggaaagttttggagatggcgtcagggtaagaaatgaaggcaagtccagttcctgcagagcctgtcacatttgcaacctcggtgttcaactcgtgcgccaagttacccaggataccgaagatcgtaaaaccagacagtaaactagtaaacgtgtccaaagtcgtgacaatcatcgcgtctctgtaaacgttttgtctgaagccgttgtaagaagagaacataatgatagcaccagtgcacactgacagagagaagaacacttgggtcacggctgcgtaccacacatcaagctcaatgagtttgttccactgtggcgtcaagaagaaaagaataccagtaccagcgccgggcagaatagaggtcgtaataagcaaaatgagcatcacgacgtaggggaagagagccaagaagtatgcagctttgccggaactctttacaccttgggacacaattacgaagatgataaaccaagaagcgaagagacacaccaccaggtaccaaatagggagaccgagtccatcttcaatgccatctatttgctgtagtacggtacggataaaatataactcagcgctacttgaagcttcgttcgtaatgtttcccacaggttgatttggatccgagggaagacagtcttcccagtcatcctgacagacactccacggtagcgtcggcaggaagctcatgcacaagtagtacagacaaagtgccacaatggacacgtagtacgagagaatgtaaccacaacccaaagctgtggcgtaaccagcacctttcatagctggtgatagcgaccagactgtgactgagttctttgagctaaattgtcccaagacgcactccaagtagtacatcg

SEQ ID NO: 1211 - DNA, 1594 bp, Plutella xylostella
caaaaattgactattggtgttatgtgtgaatcaaactgtaggtactactgttcaggccttcataaataaactacttgaagcacgtattacgatcaagcctgaacaaattaacttatattgttcggtgttacaattacttgcccagctgcttgatcagcatgtcagtgctgagagacttgggtcgctcgatggggaggccgagcgcacgagaccagatcagttgagcgaggacgccgagagcgcgagacacgccgaacatcaccgtgtagtagttcatctccttcagtccgtaatactgtaagaggactccagagtgagagtccacattgggccacgggttcttgaccttgccaagctctgttaggattgggggcaccaccttgtacacagcagcaaccagtttgaacagtgggtcattgggcaagtgcttgagggcaaattcacgctggcatgtgtacctggggtcagtcttcctgagtacagcgtgaccgtatccgggaacaacctgtccggacttgagggtcttccagatgaactccttgagtccgtcctcggtgaagttatcgccaacttgtttacgcagtttctccaaccaaacgagcacctcctggttagccagaccgtgaagaggtccagcgagaccgttcagacccgcagcgaacgaaaggtaggggtcactcagagctgaaccaaccaagtgggtggtatgagcagacacattgccaccctcgtggtcactgtgaatggtgaggtacaggcgcatcagctctgtgaactgagggtcctcgaaaccgagcatggtgcagtagttggcagaccaatccttgttgtcatcgatggcgccgatgcccttgccgtcacggtacgtgttgcggtagatggtggcagcaatcacgggcagtttggcaatcaagttcatcgagtcctcgtaaacgtactcccagtatttggatttgtgcacaccctctgagtaggccttcgcgaatgaagattcgctgttgagggcggtgacggcggcagagaactgtgacatggggtgcaacttgctgggcatgttgttaagcatggtgacaacatgtgctggtagctcagccctttgtgcccactccttggacagggctttagcttgagcctcggttgggatgtctcctgtcacgaggagccagaaaagaccttcgggaagtggttcagcgccacccttagccttaggcaaggcctgttggcattcaggaatggacatgccacggaaacggataccctcatcagggtccaacacggatgtctcccacaccaaacccttgataccacgcatgcctccgtacatcatgtccacggtgacctctccaactttagtgctgccatgtttcttacggaactccctgatcttttcctgttctttggggatcttttcttgcagaatgctcttgaggttggtggactcggcactcaaacctcgcagcagaatcgatgccgttgggcatactttctgtatttctgccaatttagttgatgtaatcctgaaaagagccatttttcaaacccaccgagcgcttgctaccacagacaactacaccttgctcgcgatcgatcgcat

SEQ ID NO: 1212 - DNA, 1654 bp, Plutella xylostella
ggaaaatgtgaaataaaatacgcacagagcatccgtattatattgacgatttgatttggttgcaaatggtaggttaggtacctaccattttcatgaaagttcttctcaacctacattgagttaattatgtagagctgatatggataggtgttttaatccaaccaaaataatgcataaagtaaaaatattttacttattttatgtaggtacttatgttaaatactccacatagaaaatgtatttcaacagggcgtacttttaggtacctacctatttgaatttcacagtacctaacacttcggtatactgctcctggcatctgtatattatacagataaatataattataacagctttaaagattatgcttcgctatatctactacagggccaatctcaatagccttcttgttatgaaatgctatgtacctatatgttgcataattcagaatgaagtcatctgaataggcattaggctttgttaggtaccatgatttctaatgttgaggcactgaaacctgtaacttgcctgaccaccgtatttcgaatgttttactatctttgttgtctatccctcgagttacctacaggtacataagcaacattatttcaccagttattaaatattagcaagcattttttatggtacctatatacaaatgaaagttattactatgttgtaattaaatccacaccagctaagaatatgttcttaaaaacccaatatttagttactcattctagatacagttcagtcacgcaaacttatttgttgaataataataaaacatgtttaaccgtgtttacgtctactttctgttaatgcattaaaaagttttaatttgaccttaaattacacatccctaatattatttacatttaatttatctgtataatgtaaaaaaagtccaaatactgtacctattttgaataataatttcacagacttacgttttgtttatattgtgaattattttcttgtgccttcatactacgatcgtctttgttatgtacctaagtattagattataggattaaaagggactagtttatcaatatagagaaaagacattacataagtgtgttgaggattatgttggtaacaccaaataatttctttgaggatgatgttttaagtggaaaaacctttgaaaagggaatcaaatgagtatagagattgcttaatgatgcgctctagtgacaacattaaacgaagactcgtcaaaatcatgaaagtggttttagagagaacgacagtttcggtcgtgaattatttttccccaatattttcttttgttcctctttgacccgtttctcttgttcttttttgagcttttgtcgctcttcgtccatttttctttgttcttcgatcatcgcgagccgctcctcagccagtttgcgctgagcttcttcaatttttttattgttttcagccatgatttcctccagctctttccttttacgagcttcctcctcctggcgggccagctcctcgcggcgctgctgctcgcgctcgcgctccagctcctccatcatctgcttctccatcttgcgcttggcctcctccaccctcttggcaacctcctgctctatctcatccttgcgcttttctcattcttcctcccctttcttcttgacgagcacttctattctct

SEQ ID NO: 1213 - DNA, 2588 bp, Plutella xylostella
cctaaaacaaaacacagtctcaaacccccacgcctattccacaactctgaactcattcgtcaccccttcaaaaggcgtcaatgtgtttccaagcacacttctggaggttccgtagtagcggatgcggtaggaggtgaggtaggcggcgggggggacgcggtactctatggtcacttggctggagcctaggagggtcgatgagcgttgccagtagaacctggtctcccaatcagcatcggtggcgacgacggtccactggcccacctcgagccgctccaccgcaaggtatgtagactcctgtcttagatcattgcgagggctggccccttgaaaaacagcaacaaccgtatcccccctcctcacttcctctctcggctgctgcaccacatctccgaaggtcctagcgaggggcgtcccatcgaacacgacgggcaggatgatggagatggtgttgctgcggtagtcagccggctctgggcctgggggcacgtcaccgccctcagcagctattttggcgaattcagagaacttgttcaaaaatatatccaacgtgtgcggtccgtaaatagttgatgctgcttcgtaacgttggacctgatactcctcataagtggccacataatgagtatactcattggtcagtcccgacaccagcactttctccgtgtccaccccactagccgagctgatgacgtcacggatgcgtctgcctgacatggtggtgggctcccctggtacccccgctactataactccggccaggtggatgagagtcacggagactatgcgagggtgccagggtaaggggaagttggcctgggggattggtaagttttaaaagtgcaaaatttatcttagttatctacttcatggtataaaatgaagtctaccactagcaataaaagtatgcatgtggtaagcattgttacttctgcaagttttgccatagattattgaattccggaagtcaacctctgctacttttaattccagtgtaaaccacccatccactttattcatttcttacccttcccgtagccaggagaataggtttcggtgcatgacactcaacatcctctggagtgggttcagcgaggatgccactgattgtgtctaggagtggattgccaacgatggtgccctgagtgatgttcaaaagatttgcaccatcaatggttcctgatgcgaaactgtagcccattccgggaacacagcctttcactggctcagactgatcaaaagttttggtgactgggtcgtatctggcgacagtttcttctggcatttcaacaaattgatgaatcaccgccaattgactcgtcaactcttcaccgggggaattcaaagcttccagagctccattgtaaaccttggtgccaatgattctggtactctcaaacatgtcatcccctggaccaagagagtagcatcgttcagaggctccacatagcaggaactggttgtcacattcgtctccagaaaactcgcacctggcccctcgagtgttcggtgatacatccccgaggtttgacgagaagaatcctgctacaatagctggctttccagtcggcagcccagggttaagcgtcttctccatcatcagcgccgagtaccccaggttgtctgaagagacgagcaggttggtcatgttcatgctggtggtatggaccgcgaaccaggtcaggactccgtggaggctgccgtccgccttctcgatcctgatctgactgagggtgtcgtctacgttggtgctatatcttgctcgctcttcaggagggttgaactcgtaggaatatggagatctgttcatgtgagcatcgctcacttgagtctggctgaagaagagacgagctggcaccacattctcatgcgccctgataatactccttgttatcccatccacataggcattatacgtttccctggagaatcccaagattgagacatctagaaggaagtccaccagataccctccgggggtgctgtgagtgtgagtgccagtcacgatcacgttgcgaagtgagtacatatcgccgtacaactcttgtagtcttttaaccacctctcgtctgacagcgatcccgacagactgcacctcggcagtgaccagcacgatgcgggtgtctccctggatgaagatgaagcttcgggcgaactgccgcgtgtggagacctgccccggtctgacttagctctgcgtagcccataaaattgatctccgtacacgggccagtcatatcagctatgccgactccaacattatacggcagaacaacagaaggtccaccttcagtggtatcttcaggggtggtcccagggtccgccgtggtatctgtgacgtcatcagcaccactgtctcggttgactaggagcacagtggtggtgatgccggctgccacggctagtactcctaccacgattaggatttttaccgtgactgttagcgccatttttgattcttattatcaccgctaaaaccaaaggagttataaaatccgcagcattattttgttcttacaaatatttaagtagaacagttttattttaaaaatagggactatactacttcattaattgaataattatctg

SEQ ID NO: 1214 - DNA, 3047 bp, Plutella xylostella
aggtttacattaactttgtataattagacgaccaatacaaaaacagcattaaaatgacattaatctaaaacttaccattaattgaacaacattattataacattccaatattttgtactctttaaaatgtgataaattacaaaacataagacaaagatggaataatctcacaataattactatgtaaattacttattaaaaccttacaaaatccatctaataataacaattataattaaaagtgatagcaaatgttgctcaatacgacatctcacaaaaactatcaggatcgctggctcagctccctcggccttctgcatcttattattataattgatctattaattattaaacaattcatattaaaggaaaggtgagaaaactaaatgtcaaaagggtttcagagcaagcaattaactaaaactgactataggaagacagatttcctagagacaaagtagcaaattattgcgtcttaaaaataatattaaaactaatacgcaaaatgaaaataacaatcttttattggaatgtggggtactggactatgtttttggtatgctatggaggttagtggaagtaatatcatgatttgatttggttttgtccacacaaaacaaagagttgatttcaagctctcactcactgcttcaaattgtttaggatcttgttgattattgatgaaacctatagccatacaagtaaaatggcacttttaaaattggtctaaaataagaagaaacatctccgtaactcaaaagatcctataaaatagttgaagcttctattcacctgcaccggtgtcagtcttaattttaacaaccccattgcggggttcaaattgccaataaactttgcattcaagtgacctctcgaattgcctttcaaattgttatttccaaagttaatacaaaagggtcagtttttggcgtttgccatccacaaaagttgttttagtttcatgtaaactaacattttctagagtcatgccagatactaattatactgcatccagtataagttagaatggctacacacgttgtgcaactaagaagctttcgccgtgccctgtggcacctccaaaccatctacgaaaggtgaatcttacgactaccacgtcactaatttctacgttttacaaaatggaggtccgcgcgcttccgatttcattaaactgatcactttttacaagaggaatttcgggaccgcaattttcgggagtaactgtctggctagcttactctatggctgaatataaatagtaaaatcggcttcttccgcagtctaataaattaagttagataatttggacccacctcagtatactttttacagtttgtaaagtgccacgaggccggcttcagctgctgaggaaggcgtcgtctacgagagggaccttcgctacttcgaagaagatggtgtgggagtacttatttctaactgtgctgatagctgacttgggcttcttgtgtaatactgcgttctgtaatagcgccaccgggaggatctctgctagtttgtatccggtataatactcgagggtgggcgtccagttgcccagcgccttcatccgcagcgcgatgtacagcgcggcggccgccatcttgctgtccgacagcgacaccagcccgtactccagcaggcacagctccaggatgaagcgcgctagcgtcagcgtgggcatcgacacgcgggcgcagcgagcatatctcctcaagaaccggtacgacagcggcacgccgaggtcgaagtcgatggcgtacagcacctccatctccatcttgagcagctggctcagcgtgtaggcgccgtcgcagatgtacaggaagtcgtccactaggggtgggatgcgctcgtcaaacttagcggcaataaacagcgacgacgctccaagcagttgcagctcctctttggtcagcggatccttgtctttctgcttgcgcgtggcccgcgtcagatacaggtctaccaacttgacggcgaggtacagcgtctcgtggttgagctcgaagctctcctggacctccaccatccagtcaacgaggagagatcgcatccagctcgtgatgcccttgcttcgttgcaggtagtcgtcgatttggaagatgtgctcccttcccttcaaatagttgaagatatccatggcatagttggacacttggaactggtcgttccagttctcctggtcgaagtccggtactccggccggggcttcgtgaggggactccgtctcatcatccagagacttgttgatggtgtcatctagcaccaccttgtctagtttctcactaatagtcttgtattcctctttagttacatcagttggacttatattttccaatgcggtcatgtagagtgagggttcaccagacatgtcactccgggccgacttccctgacccttgggaaacattctggttttccttattgctaacaactggcttctctttcttctcaatgttcttgagaatcccattctgggctcgcgctgcaactggtttggggggatctttggcaaagtgcttctgcactgattcaatggcatttgttgcaaccctttgcagggtttttgtcttggaggttttgccatttagtgtggcttgcggcagtcttatgttcttaactgtaggtagcaccttgctctcaacagttactttcttcacgacgatggctttttctttttccaggcccaaagcgctggacttgttgaaggcattcgtaatatcaccgaatgccgcccttttagcagtcgcatctttcatgggactatccgctttcctcttgtttggcgccttcagactgtctttgtaggttttcagagtagccatctgcttactcctcgttgtaataccatggcccaaaatatttaagttttcgtttacagctaggggctttgatgccagtcttgttggcgccattacgaattttaataacggcagtagccgttttgatttactgtaaaactttcctagtccaagaaatctctttcatgtaaaattcgatcaaaatttataaaatatttaacgccaccggaatgaaccaacaatc

SEQ ID NO: 1215 - DNA, 1785 bp, Plutella xylostella
gaggtcccacacgcgcacctccccgccccccgcgccgccgcccccgccgccgccgccgcccgaggatgctaagtagcgcccgcacacggagaatgctaacgcgaagattgaaagcttgtgtcccgtcatgatgcgcacctggccgccggtgacgcagtcccacaggcgcaccgtgcggtcgctcgaccccgtcgccacgtagttggagttcgggtggaactgcacacaatcaacatcagacagatgcccagcgaagatccggagcggctggtgctggtcggtggcccacaggcgcgccgtgcggtcgtggccacccgacgcgaagtagtggccgtgcggggaccagcgcacgtcccacacgggccacacgtgcccgcggtacacgactagacacgtccagcattgtagagaccacaggcggatggtagcatcctcggagcaggacagcagcaggttgcggaaggggtcgaaggccacgcggtacacgggccccgcgtggccgaacagcgtgcgcgccgtgtcgcggtccttctcctccatcatacgcactagcacgtcgcctgcttctttatcgatgtcttgtaacttttcagctgatttcatgccacgcaattttactggcgtcagagtccacaccttaatagtggagttgttaaagcccaccgccagtagcgaggagtcgtcacaaatgtcggagcatatggcggtgtgtccactgttcagcagcgtgtagaagcagatggacggcaggctctccggcccgagctgcaccctctttgtggcttctctaatggctttgcccttttctattttgtcgttctcctttagttcaggcaaaggaatcctgtcatttggaggagcattcgggtcagactttggttttttcataaagatgttgtctttttttgccttcttcttcttgggtttgtccggggtctcctcgacctcctcctcgtcctccacagtgggcggcagcacctggatgtccggctccttcagcagcccgtagtataccttggcacggttctcatttctagtagcttctcccaggacacctccagtgttggcccgcacctgcgccaggctcctcccgggaccgtcgtgcacctctatctggatgtgattgttgatgatattgattataacggtggagttcttctgctcatgcagaaaccgcttcaactgcgaggaggcatctcttgaaaactgaaccacaaacttgtttgcagtataaatttcagccagttcattgcctttgatttgatctttactcttgacaatagccaacttggcaaggtcgtccagataatagtcttcctgttctttgccaaacttgtccaagaactttgctgcatgttcattgtggtcatataatataaggctcaaatacatatgcacaaaaactggatacagaagtgtagacaactcatgcttataaacatccaaagaattgtctataaatttcttgaggctatcataagcaaactcgtaactgtatggatcactttcggtatgatgggatgttaggatgctggctaattcgacttctggcagatctaagtttccaatctctgtgtcacttaaactggcctctttacgtagaatctcttctgtgcccttcaagttgtattttcgaaggagttgcaaaactgctaggaggggggtggatttctcccccattttactgaattattcctcgctttaaaagaatcctaaacaaatacaattcaattattcaacaaaaaaaactattatagaaaatgcaaacaaacgtaaataatgctg

SEQ ID NO: 1216 - DNA, 2038 bp, Plutella xylostella
ggtataaaagttgatcttttactatgcctatttagttgtttccatttataataaatatattaaatgtatatttaatacacattttattcaaaggattacagatccaataatccacttcaaattcacaatcaattgatatttccaacaccaaacactcatacaaaaaatattcacctaataactagcattactattcttttcttccataggtacgccttctttggtcatcaattttctcgaggtagtaagttcctgggaacagggcagcaatgggcccagagggctcgtagggtgccgtgtggtagttcttggtcctcacatccatcaggtccgagaatgtttgaggtttcacacattccctcttatctattagagatattgagtcatgaagtgaacttatcaacctttgcaacttggaaccagcactcacatcattgcatatctgtatggagtacatggtggatgatagccctgacccataagagaatagtgcaaatttcttccccacaagttcttcaggagatttgctgatcaggtatgaagccagactgccatacagggaggctgtgtacatgttccctacattacgagctaaattcaatgaaggtttagtcttttcttcaaatagattttgactataagtcataaatgctttctctacatctcggtcaaagtatgtttcctctaacttatgattgctaaactctgatagtcctgggaactgtttctctctatcttcaggtggagtatttaggaagtcattgaaacacatccgtgcaagtgatttctgcaccaatttgcaatagggagagtggaacagcatcccatctaaactcagaagccccttgaagtcgggctgatccctgcgcatcttctttgaaaataaattgtaacagttgtctagagcactgagatagcacttgatagataactttccatcaacaaaggggaactcagatgccaggtcaggcttgtagaagtcataggcgtgagtcatgtatgaggctctcacaccgcggtcaaatacaagaggggcatccggccccaccagcatggccacagctcctgcccctcctgtgggccgcgccgggcccttcccatacacggctatatctccagcaaccactatagcttttcgtccatcccatgaagatgattctacccagttaattgcattaaacagagcagctgtgcccccatagcaagcatttgttgtgtcaatgccctcaatatctgtggctcccgcctcagcaaataaggtcatcagaaatgtctttacactcttgcttttatcaataatagtctctgtaccgacctccaggcgcccaatgtcgtgcaggtcaatgttgttcttctcaatcagtttgtgaagcacagtcatggccagagagtttatgtcttctctgtcagagcagaagcccatcttgctctggccgagcccgacggtgtatttcccggcggcgactccgtcgaactcttccaggtccgtttggtccacatattgtgaaggaatgtaggtttccatggccaaaatgccgacgttttctactttgccacccatgattacagttacgcgtgcggcttttaactttcacgttcaagggtacgtgcggagcgtcgactcggcaggcggcacgcactcggcgacggcggcggctcgcgactggcggctactgctcagtattctcctcgcctcactagatcacgcgtcttgctctccgcggctcatcggccacgactgagcactttaacttgcccgtctgtcgacgtaagcagcgtccaacacgccactcgacactattaacctactacagcccagttaccagctttctttcaatcgcaatgcgagcgcacaacaaaccgatttgattaattaaaatcactgacacgtaagtatgtaaactgatgtaacaggtagtgtgtttatgctgaacactaaaaatacttgtttctttaattagatacgatagtttttctatattttctaagaatttcaccgcaaactaagttcgcaactttcacctcatttgtaattttg

SEQ ID NO: 1217 - DNA, 2025 bp, Plutella xylostella
cataattgatgctttgacgtgtgtaatagttaaatggtgccacccacccttagctggtaatacatatttgctgactgtgcctatcctatttaatttctactttggtatcagtaaattcttaacctcttcaggagtgcgtctcacaatcaattgaggttcattgtagccgtttgctgaattttgaactgctgtgtatagttgttcataaattgcaagtataacttcaaaagatctcttcttaataaatgattgatgtttgtgacttaacagcagatttagttgctgtaaggtgtataagtctggagagaccaagaacatgtcaaacttatttaagaacacctttaaagtattactatccatgccaggaatagctgagaggggtccattcactttttcttgtaaaatggtgtagataggcccaagatttaaattggccactagatagctggcttgttcagacgtcaaagtatcaatttgtgcttcagactgtgcttgtagcctctcattgtattcatccattattgtgtacagagataaagtgcattgaatgtgatagatacaatttaacatgtaaactgacatatcagtagagctcagatggcaggcagtttcgttgatggcttgcaagagtgggtccaacatgtgggtgatgataattttcttatcagctgtatttatgttgttagaaacattcataactgccaacaaatctcttaggaaacttaccaaatcagtcactacacttgatggacttaagtctgatggaggagctttgacaccttggcttaattctttttcaattttactatctaatgcaacaataaacacatcttcactttttttaacaaggtcttctaaagtttcatctaaatgacctttaggaacagttgcttttatagtatctttataatagataaacaaattggtgatggaccacagcaccagtggatctttatctggtttaaggatgagttcagctctcaccttcagcagagggcagatggcttccatgatgtttgtgagcacttctattatttgttgatttttattttgcatttcacagtgtttaaaaagaatagaaagattttctttctcaactggaatgatctgataaacccaggtcagtatatctcctatgtagcgttttgggtcatttgcatagaattcaataggttttgagcctccatcttttcctttagtgagagcatcaataaacaattgcacaatcattgtctttcttgctgtggcaaattcatccacaatgtttgaaaacagcacttggcgattttgaaactttgctattgcttttggtactaaagcattgtttggggagtcaatgcctcgacatgcaccaatggtccaatgatatagtttttccatggcaacttcttgttgcagcccaataatttccatgatatcaaatgctgaagtctgataccaatatttaacaagcattttactcttgtcatacaaaccttcaatatgagaaagcgtcactaggaagtcagatgttagaggtgttttgatggacacattataaagatattcagcttgttcaggggacagctggaaattgtttacaaatgtattcacccaaaatattttcttttctgtttttttgctatcatctttaagccgcgtagtttgagagatgaggtggtgagtttttgttttagaatcattcaatctgctagacatatctttaacagattcatcaagagaagatatggtattcaatagtatattcagtttttcttttactttattgtattctgtaagaacggctttatttacaagcatatcccttttttcaatttcatttattaatactcttttggtattattggattttttcaaacaaagtccagacaaggtattgagagcttcgctattgtctgtaatgatatgactatcaaatattttgttaatcttcttccgtataggattggtagtataaacagactccatagtacacactgaagatggaattataggaaatttaaagaaatcacgattaaaaatcac

SEQ ID NO: 1218 - DNA, 3914 bp, Plutella xylostella
tggcgtccagcagcagcgccaggcggctgagcccggcgtacagcggcgcgctgctcacgaggcgccgccgcttcaggaccacgacttcagactcgccgccgcctgagccgccctcggcggagccgcggcgggacatgaacccacaggaagtctcttcgatgctgccgtctcgtttcttccccatcttgcggaacccgaaccggttcagtctgtcttccacccgtttccttgccctgttcaaagtatgtccgaccctccgtttgaccggtctactggcgtgcggcatgggctgcgcggggtgcgacgtggcggggcgcgctagggacgccatgctgccggagatgggcaggctctcgccggacccgccgccgttgcggagtaaagagtgcgagcgcggcttctggcggaaccagttcacgatgtggctgatgtgcgtgtgttgccgcgcgtgcggcggcggcatggctcgctccgagtggcgcggggtgaggggggggcggcgcgggcccccgcacaggggggactggctgccgcactcggacacgcattccgcttctaggaggctatgagccccagtagaactcgtactcctcttcttgaatgtgaacttcttgtgcaccttctcatcggccgcgcagcccgagtccgcccctgtgtctgaaccacgctcgtcgtcttgagtgcgtgggatgtggcgaatgaccctggtggtctgcatgtctcggtcccgctgctcgcggcgctccgccgtgtccaggagcccgctgagcgctgtcaggcggaacacccccccgtgggactcgcgcacgtagtggaggagctgccggacttccgtgtagagggtagaattatccagcatcttcaactccttgtgcatcatagcgaaccgcgtgacgagcactcggaaagtcgcctctacgacgtacgtctctatggctctatttccctgcagccccgcgccgaagttagtggcgtagcccgcttgcaggtgcgccatttctggagatttccccggttttagtttttgttgcgtcatcggcgacaccatagaagcaggctccgcgcagtacccgacagtcgcatgcaagttatccagcacctctctaatattcgcagtcttcgtcatttccttcagtcgcagcgtgaacttgggtatggaggctgtgcgtagctctcgtaacgagtttctcgcttggactctgaggcattcggcttggggcccgcgtagcgctgaggaacagccgtgcgagcagcctagttggcggaggagcctcaaaagcacgtgcataatcatatgatacgggcagtctatttcctcttcctccttcgttttctctttagtactgtcgccgccttcagcgttcgtggactcttgactcgccgcacatggcaggcccgagtctctgcccttagtctccctctccttgttaaagtccgtcgtcgggtcactactgaccggcacctcttgcgtggggtcccagttcttgtgcactccgatctccatcagagtgtcgaccaggttcagcatgacctccatgacgcgcagggtcaggtagtagctgtccattgtggatacggagtagaccgcctttaaaaccacttgaaagttgacgtcgccatccctggtgatgtagtgcgcggagccgggcgcctcctgcgtctcctccagcacgtacgtgatgttggagtcggtctgcgaacgggtcaaactcggcttccgttctggagtccgcatgtgagcggaaccctgcatgctcactgagtcgagctgggactctagggaaccctgtctagttttagacaagtaatcgggcgacggcgtcggggtatgttctgtgaccgtgatgatcggattcttcttcttctgagtggtggaaggcatctgccccgcgtgcacttgggtccgctctgtctttacctcgccaatgtatcttagacttggcatacttttgcctttgatcagattgcactgaagtagatcgcccgtttgtctcggggttataggcgagaaattagtagctaatgctgagttgggcctctcttctcctgtatcaaggcttctgtggtattcctttatctgacacacggcagcatgaaagttaaacttgtgatcgtcatgttcaatcttttccaatgccttctcggatttcgacagcaattttgtctcaacaaacgcttttaggtcggccattttcatcttccgtttcactttctcactcgaccgtctcacaataagtgggtcttcgtctattttgacggcggcggcgaaaggggcgtcggccactggggatatgttggtcagatctggaacctccatgaagtttttcagcgaatctcgtttcttcatctctgggctctggtaaatggagacttcgatttttggaatcggcagcgagttgcttctcttccgcgggagcgtctgctttgagatgtcgtcgcagatgtcacgtaatctgttgtacaaatagtgcagcgcccaataaacgccttcctcttgccactgcgacgtgaacagacatctcagagtagccacatctaggaatgttgcagccgaaacatgattttgtttaggtgaagatggtttttccatagtaggagatcctttctgtccttgagtagccccgccactatccgacagagattctttgtctgatgaactcattttagtaatctgtggcaggggtttgatgccggtgagcgagggcctgcctgagtcggaccttctgatctggaacagactgggatcggcggagtacaccgtgtatggctctttgaccacaccaccgtagttctggtccgtcggtagtcgatagatgaacacatgttcttcttcagtgctggagctctcctccggtatagtctctgggaagatggtgtctttaggagaggacacccagggctcctcctcggtgctggcttgtttggatggagcgtcacactgggagacggtctggctcggagggctgtcgtgtgctgtgccatcctctttggaaaacttgcgcccaaggaagatgtctccatgcacatttttcttgctgaacctgccacctaggggcttgggcttgggcttcacatgagtgctgaagcagggagcgtccgggtgccggaactcccacatcgcttgccacatcttcagaccattctccagacggtagttggagaagtctgactcttttaaatgttgcgagattggtgcaaacaggtatacaaataacgccatagtgggcacagagaagagatagtggaaagggttggtgtagaatattcccttctcatagtcagcgtcggagcattcatcggaggcatcaagtatgatccagtgcagggtgtagagaagctttgtctccacattgcccaaggactgcatgttgtcttttactctgttgtggagcagggccgctagtgagtgcatcacgtgcggcagggaggcctggatcagcctccatcgcgggatagactctatagcctcagttaaactgatagataggccgaagcgcaagttctgaaccagcactttctcgaaagacttgcacgcttcctttaactcgtgatggcctggtgctctttgacagaacatacaggcggcatcgtggactttcccaagtctagggcgaacgaagggcgcggtttgtcgccagaggaatatctgcacggggatggggaccacctcgtccaggtacctctcgtcttccaacatggctgccggcaatcaagatgacaagaaggaaattagccggaaagcagccgccacgcactttactacatcacttcaacaaaaaacaaagcactttgaactctatttgcctatgaaactgaagcaggggtccacaacgtgtggtatcattttgaggcaggggtaggtagggttcacacagttatggagggctaaggcaggacagttcagtggaaagctc

SEQ ID NO: 1219 - DNA, 1975 bp, Plutella xylostella
tgtctgcctttttatcaaaaaggggctagtaagtatttggttgcgatgcgacacataataattaaaaatgttcatgaaatttaaactaactatacctagcatacctaccataggtagttcaataaagtccttatgaataatcttggataatatatccttgtggttattactaatagtataaggacacaaagatcagttcccacactacacagttaaatatgtatactaacttaaataattcctaaacttcattcagtcatacaaatcaaaaatttctatacctaatctatagtaaaaacgtgttgttagcagccgctcggcagtggcttgatgtgcgcgatggagctgaggcggcgcgtgcggcccgccggcgccgcgcgccccgtcagcttgctctcgatctgctccaggctcttgccgcgcgtctccgggacaaatattatcacgaaaaacaatcccacaaaacaaatacacccgaacaaccaaaacgtaccgcaaggaccgatcccgtccaagatattctggaatgttttcgtcaccgtgaaagtacacaaccaattgaaagcagtgcatattgatgcggccggacctcttatcttcgccggcaatatttcacccatcatcaaccacggtatcggaccgaaccctaacgagaaccctaacaagtacagcatcacgctcgtcagcggcagccagcccaggctagagacatccattttgtacacatctctaacgtaaaagaatgtgccgagtagaatcaacgttaaagtcatagttacagaagaaaaataaagtagaattttacgaccgactcggtcaataatagccgttgctatgaatgtggaggcgaagttcacgacgccaacaatgatggttgacagatgctcgtccaccgagctgcccgacatctggaagatctgcaccgtgtagaatattaccgcgtttattccggacagctgctgaaacgccattaaaccgatacaagttaatatcgatttcatataaattcttgaaaacacttctgtaattgtcgattcgttggagctgatttcggagtcgatgagagctatatcgcgcatttcttcatcgatgttggtgcttttgccgcgcagccactgcaaggccttcctcgcctcgtccgtgcggccgttggagacgtaccagcggggcgtctcggggatcatcatcatgaggatgaagaaggggatcggcagggcggcgccgaggtaggcgagctgggcccagtcgaggtacttgccggcgacgtagcagacaaggatgccgatattgccgatcgccgtgggaaagagtccgagcgtgccgcggacctcgggctggatggtctcgccgagatacacggggaaggcgagcgagccgatgcccacgcacaggccgcagatggcgcggccggccagcaccaggtgcaccacgcgggccgagccgatcaggatccagcccacgaggaacggcggcgccgtgaacaggatggtgcgccgccgcccgatgtagtccaccagcggcccgccgatgatcccgccagccagcgccgcgaggggcatgaggccgcccacccaacttgcctgttctttggtaactgatatgtaggtgctgttctccatggtaacgagggcgggcgaggtgtaggcggacgagaagcccacgatcatggagcccagcgacaccgccaccgccgccagcacctgagaaaacgtaaaattcggcttatcatacagattactccgcactccgatgctgtagtgggtgtctgctcgcattaaaatcttcattttgatagtttacttttactttcacttaacagtaaaaaagttgtttgtcacgatcacatagatagagcactgaaatccgggagctgcgcgcgcgcaccctctgtcggcgcggccgtcgtagcaatggtcacacccactagctttactacgatttatatggacacaaatcaattgccttccaatctgat

SEQ ID NO: 1220 - DNA, 2558 bp, Plutella xylostella
gggcttgaaaagaaaaatctgatatgaatattttatcactttttcacctttataaccaagtgaacccataagttatggggttatgggccataaccccttagcagataaccatgtaacctactttactctaatgatactaacttaaaccgtgtatactaaccatctcgtgactcatcttgttacttgaataaatgaattgattataacctgtctactcactctagcgacacctccccattatccctagtctccctctcgagccggtccagcgtatcgagacacatcttgtagcttgcgtgcggcgcgccggcagtcccacacaggctggccagccgccgccggatgctgtcggcttcctccttcatgcgtgtaggagatatcagctcggtcacgtgccggatcttgtctgctcggatgaagagctcgcgcgcctccttagcagcgtcgccggtgatcgcatggacggcgggcgtgtggctgccggcgcccttcaccagcgtgatgcagaattcctccagcgcgctggtagagggcgcgtgggtgccgcagcataactccctggacagcaaccccggcccgctagcctccagcacccgcagccctgcgtccgggtacgtctccccggggaccgtggtcacgtctgacacgtttatactgtccactatacatgttgtaatgggcacgttgctggttattgtttgtctaactagttcttgagcatctaaaacagccttctgggatagtttctctccataaaccgacaaatttaatgtgcaccctttgtcagtaacttttgaacctatcggacacacaacactatttggcagggctttcctaatcgctgcattcaacaaatgtacaccagtatggttcctcattatatttagccttctttcagtatccaatactaatctcacttcactttcacatttcactgtattatttttgctattagttaattgaaaggtacctttgtggaaaacaaagtctttgattttgaaaaccgcttcgacatttaatactgtcttttcattgataattatagtgcctgtatcagcgatttggccgccttcttcacagtagaaattggtatcctttgttactaggtagtagtgtttgttttcgcatggttctgtattatctatccaatgtccatcttcattcagaaatgcaactaaattggtcttcaatggttcgatgataagttttttgtcttccactgtgtaatcgtatttgtattgatcgttagttctttcgacgccattttgttttatcttgtctatggcttgttcaaacatggcggctttcgaatcagcttgttctttgaaagaagttttatgtctacttctgtgttgtgctagaagttgcttgaatttctctttatctacttgtaaattgtttaattgggctattctatctatgtggtcttcttgaaaaccatgcgtgtcgtacaatttaaacactaattcccctggtattactgtcgaattcagcttggttacagtctccttaaactccttatatccattagcaaaaccagtcaggtcgatatcactcaaactctccacctccggataagctttagctaaatccttccatttcttagccaatgttgacctcagcttcttgaaagattcttcctcatactgtagaatcagatgagcatccttcctcttggagaccagctctgggtaggtgggcccgagggtttcagctactacgtcgtataggcgaggcagcattgacgggcatttgaatacgtcggaggatattcgaagcgatttgcgcaggatttgtttgaggtttaggctggtagcggggaaggctccgtcggcgagacacacggcgatcatgcgcgcgtggtccgccagacggcggtaggcggtgcagagtgacgcgtccggcccatacgtacccgcgtaggggtccacgccttttgcgttcatctgcacggctgcaacgagcggcgcgagcaggtcgctccggtagttgtcgggcacccgctgcagcagcgaggccgcgcgctccagccccagccccgtgtccacgtgccgcgtgcggagaggatggaggctgccgtctgcttctctgttaaactgtataaacacgaggttccatatctcggtgagggttccatcaacgttcacatggtgtatctcggtgcagggaccgcaggggcccactagacccatctcccagaagttatcctgagctcctagtggcttgagccggtctgattgcaccccaatacctttccaaatatccctgcactccctgtcttcaggcaggcctagtgtgggatcgccaccaaagtatgtgaccaccaggtgttctggcttcagtcggtacggacccaggagcaggtcccatgccatctgacaagcttctttcttgtaatagtcaccaaaggaccagttgccaagcatttcaaagaaggtgtgatgatgcccgtcagtgccgaccacgtccaggtcattgtgcttgccgcccacacggatgcacttctgcgagttcacggctctggggcatggaggctgcacttgatccaggaatatgcc

SEQ ID NO: 1221 - DNA, 1191 bp, Plutella xylostella
acttcgacacgtttagcgcagcagcgtcaacgctccgaaactccctataggtaaacgtaggaagccgtgacttctcaagtagcggggggctagttagttgaccttggagtttagttgaccttggagtgcggcgcgaggatgtgcagctcgtggtgcggcagatcgcgcaccaccgccgcgtggaacgccatgttggacgtcgccaggatgtactcgcagacggagaaccaggtgaatgctaaaggacgacacaggagtcgatgcctcaggaacgatattatgagaccaacagtcgacgctatagcgatgtagtataggatccagaccaggtagttggtccgtactggctccacaacatttttggctatacaacctacttttgcgcggcataacatgtgcgtgagagcagctatcatgaaaattataaatattttctcgtgtaagaaatagttttccctattggaaacataagtgactccggtcagtgcgaaaagctccaccaaattgagccaatagcaggcgacacctaacttttgtgcagttttccgatcgttaggatcggttatcagagcagtgcgttggttgtggtagttgtaatacaaagagcctattaacaacctaggtccgagatggaaggcaatgcagatcctccacacgtatctttgcgggcttatgcccgttatagcactaattgacggcaccacattgtaaaccctacaatgtgtttcatgaatatcgtcagcttggaatatggacgctgtcacataacagaagactaatgcgcccagtggaagccaaagtgccgctaaacatatccgcctcagttcgcacttccatagaagaccatgatactccaatgtggagactctgctggtgacttctccgttctccacagagggccgatcattcgccccctgaccctcagcatcaggcaacaaccgctccggttcatctacttgtatcatctttcgagccgtaatcgacggtcaattacgtattcaatttcatctcagttccgacggacgaaacattgtttttgcgtttatttagatgtttttaaccgtaacttgaatttaaagccgcacattttactgtaaaacgaagtggaattgatcaagttttatcggcacttcttttgtgaacgtaataatagaggggacgatgttgaaatgtgtgcgggtgacttaaagg

SEQ ID NO: 1222 - DNA, 2043 bp, Plutella xylostella
gctaacagctctatattggtgagtatctcatcggctatcacataaaaatacatgtagcttatactttgattatttcattcattgtttgtcatactgggaatatcttttataatctagaaaaatataaaatagctataggtactctttggcccgtttctcacttgggtaaatcacagcgcagcattccatacttaaagttctgctcttgacgttctcaggagtacaactggtagtcttcttaccttttcttctactattactgttgtttggtgggtttaccaccatgtttttgactatgtgcagtttaaagtggtgcctaaagtttaaaactaacaaagttaggtgataagtctgtttgggatagcttcagaataataagtctaatataatcaaagaagtctacatgatatgtacgataatacgatgttcactaagtctactatagtataaaacctttatcgcacgttaatgtcatattattgtaggtaaagtatgtttttaaatacataatatattacccatatactacttcttaagtttttgttgtataggcgacaatataaattaacaacaacatttagtcaaaatacaatgagagtatttttttttatcagtaacagaccttaactaggtaagtacataatattatgtagtaaaaatatctcatgtcagtattataataagtcaatgcccatgtctattttaatgtaagtatatgtaatactgaaaatcaatcgagacaattttaatcgaatattttactctttataactctttccaatattctatttatgtttagggtggtctttagatgactgcacctagttctattcttctatttgtctttcttttcattcatataataattgagatagctcaacaataatgtagcaattactttacaatcacatagttttattttatccgtgaagagttcaagatgctatacaacctgatgcattcatggggttccactgcgggaatctgtgcatcattttcattatattgggaccaggcggtgatgtctggccctgaagttggcacatacccattatttcgtaatcctcaaccaaaacccctactttcgttaaagtatccaacagagttttaacattttcaatttgctgttcatccagctcatcaatattataatctcctatgaacatgatgctgataatcctgctgttgcaacatccgaccatggcaccaacaatattggctcctcggccttcaaacacgagtcctgaccccccaaccaggaagttgggtcctatgtctagaaagtctcttcttagatgttgttgctgtatgttcaacacgtgttcgatgcactggcgcttgtacgtgcacttggtctcggcggagtggccgaacacgaccagtcgcacaggaatgttcaagtgggtcatcgtgtacggctgcattgcctgccagtctcctcgccgaaggtaccagaagacattcaaaccaatatcaaggcgtttgatgctcggcgtgatgaagtacatcaacaggccgctgagagagcaggcaacgagcagggtccagcaggtgaacacggccacgctggcgcggcaccggcgaggcgcccgcgacgactccaggtccaggccgagaatacggcctttaacaacttcattgttagtgatgtgttgcgttactgagatgaacttgggtcccacttgcactctcgaggacttggtcaccgtgagctgctccacgcgagggcattggctgaacacttcggcaggaaacactgcaggagcacagccagccctgtccacagcattgtttgattgcaccaagttaaagtctcctttgttttcagaatctggcatcgcaaacactgactctatgtgaacaccaaactacaacaagataagtaggtaccttatactaaggccagtggaaagtatttacatgctaaggtatcagatgttttttagtttactatgttgttaacttgactcgagtgacacaatggtaaatgtgggatttccacgtcgatcggcgcgcgcgcgcgactagcgtcgtcttttgaca

SEQ ID NO: 1223 - DNA, 1175 bp, Plutella xylostella
cccaaatgaaacagttctctagtggagaccacgaacgatcaaaaaaagcatgggatatactctccaatcgacgacgtcaaacaggttgctacgtacttagtaagtagtggctatgtttttagcagttgtttgcgtccagaagatgataaatttatgaatttaatccaacatttaatataaatttaaaaagcttatctattacctgtagatactacgaaaaaagttacctcagagccaacatggatggccaaaaccatatcgaagtcaccaggtgagatgctgatgtgcgcgcgaccatcgtgtcccaccgtcactgtcttgccggtgcaggagtggtgggacttctctccagaaatcacgtcacagtatgtaccagctggcagacaggtctgcaagctctcattcaaagcccatgagtctccgttgaaagcgacaaacgcatttccaccgcgacagaaggcgatctgattgctgccattgtcccaccagtcgttaacccctgtgttgccggctgcattcctaaagccaaccatctggtagattgggcgccaacgatgctcacagatccagccatttccacacgtgttatccgagttgatagaaggagaaataatgttgccatggtgatccatcggagggccagcttcggtgtcccagaagtcaaaactgctcatcagttgaggctctccgtaaggatgtgccaacatgaaagctatagctgctttgtactgctttgcttgcttgtaggtcaaaatgtttccaccagcaccatgacctctctggttgtcatggttgtcgatgaaggtcaaagcatcctcgtgaggcagcagaccccatgcgggtccccaagtggacaaccatttcaactgattgtttcccttaaaagcattgctcagttccagtccaaatttgaattctgtgacagccgctaaggatgtgtattcttctcttctcacagcttctcctccaaggtcgataacttcttggtagatgtaaggtctagcaccagacgggaaaccatgagcagtgttcaagttatgaagtctgctgtagatgacgctgaggtctcctggccacatgtgcttggcagcatctattctgaatccagctacacctaagtcgatgagcctgttcatgtagtcaactatttggtcacgaacgtattcagtgccctg

SEQ ID NO: 1224 - DNA, 959 bp, Plutella xylostella
gggcttgccagtagttatagtagggaaaggttttgatgagatctgagacaaaatttctcatagagcatatggagcagaagggctagcacaagacgccaacacgtgacaaaagttctacatcacactcgcttttgaggctgcatgatatgatagagctcaatacaaaactattgtcacatcttaattgggccctgtgtaacccttcaggctcaatgtctgacacaaatacacacaagacggagaacaataaaacaaatgactgatcagtgctcacctccctcgcctgcgccatgtcgacggcccaggcctgcaggtcgcacttgttgcccaccagcaccatgggcacctcctccgcgtccttcacccgcttgatctgctcccggtatgacccaatatcctcgaaactcttggcgctgttcaccgcaaacaccagcaggaacccctcgcccgtgcgcatgtactggtcgcgcatcgccgagtactcctcttgccccgccgtgtccaggatgtccagcagacacgtctccccgtcgatcaccacctgcttcctatacgagtcttctatcgtcgggtcgtattcgtccacgaagtggttttgtatcaactgtatagtgagggccgacttgcccacgcctccagcgcctaccaccaccagcttgtattcggtcatcctgcgctgtgcgaggcaaaatatttttcacaacacaaaagtcacgggccacaagaaacatgcacagcgtcgacgggatagccacacctaagatgttactcacaaaggcatgactgtcactgccgctgtattattgcactcggcacgcgtaatacggttaattaatttatttattgcagacaaaatgcaataaatgacaatgagatggttcagtcacccttgatttgattgaatatttttttatgcgtttcgtttaggttgcgtcacatacgtaacacttttcagtgag

SEQ ID NO: 1225 - DNA, 1113 bp, Plutella xylostella
gttttttgtatttttgtcattataaacgtacttaataaataataataaatttaaaagacacgtacaacgtgtgtttacagtatgtttaatttaatcttactttagtatgtacagtcataggtagaaagttgtacaaaacgattgtgcatagatgttcttcgtataaaaaagggggtagtccgtatctaagatggcgtatacggggtgttgatgtaaccgagggtggggcgagggcgtcgcagggcgggcggcggcggcggtagcgcactcgtgcgcgagcgcagcacgacgtccgccgagcgggcgccagcgcaggctacagccacttagccctccgcgggagcttctccctctgccggcgccgccgcgcccttaggcttaggtccctgccacccatcgcacatttttcggaggaacggatcttattactaaagatatgacgaggtgtgtcgcctctacgccatcaccttcttcaggaatggtgcataggggatcatgccgtcgtcatcctcagcgtccatgcagtcctttgtgacttcagcgacttcattatcttccagtttctcacctaacgcaaggagcgtgtgtgtaagctcggcgccaagcataagaccgttctcgttcttgtcgtacagtttcagacattccaagaagtcttcgtactgaccctggtctttgtctttctttgcttggctgtagatgggaaggaactcttcaatggtgagcgtcttctcgcccttcttcttggtaccaccgagcttctcgatggtggccaatgtggggttggagttcagtgccctgaggacatctcctaggttgaaggcatcgatttttccgctaccatcgaagtcgtagatggagaaggcgaaggaagccctttcaacgtcgttcttgctgaggtcgctcattttgtgtggtgttagttggttccctcccggtcttcactggcagacgttcagacaagaagtggggttcgggaacttttcgcgggacggttttaactcgcttagatggcgcactcgtctggatatttgagatttagcccaggaatccgcgatcgttctattttgggcgaagccgattcgtctacctgaaccactctgttgcgctagt

SEQ ID NO: 1226 - DNA, 2402 bp, Plutella xylostella
ttttgaattttattattcgatttacactgtcatttacaataaacttcaatgtagttggtaggacataaaccaatattgcataacactaaggctaaattgcatcagtattttgtggataaattaacaaaaatatatgcaatattacagattcaaataaaataacgctaatatcttactcgggcacctgtctcgcactgcggcggttgctgagcggaggagctcatctaatgcaagatggaatgtctcgataaatagcttgccccaagtgcataactagcctagcaactccactactgttcgtcctgtataatgtataactcgtaagagatgtagcgctacaccaaaatttccagaacttgcgaaataaaaaaaataaattaaaatatacaaaatctctatcacaatactcgtaagtaattaaagcaattcaaatgtgaatactccaaatgttgaaatacgaaggaagcggttacatcgacaatgtctttactctataagctcagccaggcccttcccaatcaaaccaaatcgaatagcaaattatttgttcaataaccgtactacacagtagtcacactttacacatgtataaacgttgcaataaatatgtacgctccacgcgataccagatacagaccgacaagcgacgccgctatcacgccgctataatattgcaatcactacatataccattctaataatgttaaaatatatggataattgtgaaatgtataagtaaatgcagaggatcggctcgcggaagacagagggccgaagcgaagcgaccggcgacgtttgtgcgagtcacccggggcccgggtgagcaccgggtgagacccggatgagcgccgggcgagcgccgagcaccgagccggccccgcgcccgctccactacaactcgctacgtgcaagtacaagtctcgacagagttacatacatacattttattacacacggtataaaatatttagaaaatttacaatcgtcgtcttagattaactgcgagtagacagatgataggcccgcggcccgggggcggggcggctacgaacatcacgagagatcaaagtgtactgttaagaaaatactttcttaaagacaaaacagttaaacagttaaaatgcaataccaaagtactttttcttaaacattatttttttcgtagtgtgaaaataaatatatcaaaagaagtacatgtttaaaatgttggtttaacacccatagataatttgacacaatgtataaacaaaagtttacaatgaatcaggtcgatagacagtcggagcagacagacaatttggtgcgcggggcgcgactcgcagggtctcgggtggttgcagattacttcacatccggttgtcatcgagggctgggtcttacatgatactatagttattttttttattatatttaaatagaatgttaaaaagtattacgagacgtcctgatcctccacgtcttgtgcttgttctttctgttcagcttcaccagactcgccgtcgccctgcatgtcggaggtccacagcgtgaggttgtcgcgcagcagctgcatgatgagcgtggagtccttgtagctctcctccgacagcgtgtccagctcggcgatggcgtcgtcgaacgccgccttggcgagccggcacgcgcggtccgggctgttcaggatttcgtagtagaatactgagaagttgagcgcgaggccgagccggatggggtgcgtgggcggcagctccgtcatggcgatctcggaggcggccttgtacgccaccagcgagtgctcggccgcctccttgcggtcgttgccggtcgcgaactccgccaggtaccggtggtagtcacccttcattttgtagtagaagactttggactcgccggtctgcgaggaggggatgaggtgcttgtccagcacggcgaggatgtcggcgcagatgtcgcgcagctccttctccacctggctgcggtacgcgcggatcatgctcagcttgtcctccgcacctttggtctcttccttctgttctatggaggagatgatcctccaggaggcccggcgtgctcctatcacattcttgtacgccacggagagcaggttcctctcctccactgtgagctcattgtccgacacattcctggatgctacattcttcatagcttccaccatttcatcatagcgctcagcctgttcggctaacttagctttgtacacattatcttccctttccgacattgtggatgacaaatgatttttcactaactaaaaccgaatcgccaggtcactaattcaccaagatggccgcacccgccaaccgaatccaaattcgatcttcaactaaactccgcccatgacgtcattaacacgacttccgttttggaattaatgttgccaaccgaaaataaattttaatcaa

SEQ ID NO: 1227 - DNA, 2620 bp, Plutella xylostella
gcgcaatcttgaatattaaccctagacgaagaattatattgcaaaattgacaatattacgcaatataattgatcgtctaggggccgcaataggtgggtaggttggcaaggtacaagtataaccgctgccaacttcagaactatgaagttgtttgaccgaactgtacaactttaattagagggcaaaatggcatgtattgcagatgatatgcgacatggattggcgcaaatgttagataagatagataagtttttggagatcaaaagatcgggagatctttagaactctgccctcggtaatagtttaatataacaattcatcaagcttaattttagattcaattacaaaaggccacacatccggcgtgaatgtacattttaaaaaagatacactattattgtaccgatttaatattctaactaaatcgaataacatcatttaccttgtcgcttactcttaaaacctaacaaagatagattttgtgctgcaaatggcatttactataaaattaataaaaatataaaaacaaaagcatacagtacccaatttcccccctaaatgtgaacgatatacataaaactagccacgttcacaaaaataactaatataattttatatcgaattacattaatatctttagcttgtcataaacaattacgagtataataatttccttacaaattatgtctttaattataagaataattacacttaaaaacgtcttcattttgcaatttggacacttacttgagctgaatatattgaaaataatattatagttatgcggattttttaaaatgctattacgttcatggtttctacagacatgtccaaaaattttatatcatggagctattctgatacgtttaaactttacttaaccctcaaccaggctaccaattttgtatttcgaccgtagattcaatgtggtctgatattagcccgattaagtatagggaaaacggatatggcaacggaaagtctgtagacagccaataagaaaaccggtgggagagttttatggcgttgcggctaagatactgaggagatggcgttgtgtggggagcccatctgagtgagaaccttgtctagccactgcaggggcccgtgcaggtgtatctcgatccaacacggcgtggacgtgacgtcctggcggtggtactcggccccccaccccttcacgaacgacatacgaatagtgcacatcttagtcagctcgtaaacagcttcgaagccgtggttcacgctctgcgacagtagctgagcgaactcgcggttgttgaatatcttcagcgagcaccccggcgggatcttgcacacggtggacgggtggaagccgtggtggtgattgcagttgcggctctgcacaaatattgccgcgtccgacaagcactccgcgtacacctccccgcccacgtagtacaaatgcacgcctttgccaatgtggcgacgcgtattctctatagtggaattcctgttgacgttactcagctggccgaggcagaatctgtcactgttgttcgacgggtcagtgaacccgtccacgacgaccgagtgcgagttgcagtggaacacctcgcccacgcggcagttcagctcgtagtaggccaccgaggcccagtagagcggttcctggtaggatactggggccacctccccgggaggcaggtctgtgtcctccgacggcggggagtaggccgggggaggcgtgtcgggcagctctgagctagccgatggagggaaaccggagccagagtaggaaacattgtgaggcatggccggctcagtggtcctttggaacggtagcagggaatgtcccggagcaaactctgagtgtcttggaactaggacaggtgggagcaccgggctctccactcgcttgtagtggtaagggttgatgcagacctctttctgcttggcgctgaaggggtactggcagatctcgagcggcttcagctcgtggtggctctgcaggtcgggccagcgccacacgcggcagtagatcacgtgcgggagacccttgcggtgggatacctgtaatctcccatcaagtgacctcggtatggtgacacacttggagggtgtcccggggcaggacagggccctctccagctcctcaatagcccccttcctcttcttcagcttcttcaccagactgtccaccgccttctccgcccatttctcctcttcatcaccctgcttccatcccagaagcttcttgaccgcaggacttgtgaatgaaaagagactgttgaggctggacataggcccactgctcgaggactctccatcgtccgtgtccatggttacaggcccgcggcggactgtacacacgcgagtatgagtcactaagaccgcggcaccaaccaattacaccgcggaaatgcctaatccaccatcgatgtgcaaccaatacatttggtattccccacacaactactccaatcaactattgcaagcgtccactttaaaccaacactgatcgccgtagaagttttagttgtctttgttagatgttgtagcgtctttgaacaaataaaaaactattttattgcgaaatatcgcgatgaattgaaaatgtttttacagaaaattatttagcaaaactctacacttcaag

SEQ ID NO: 1228 - DNA, 917 bp, Plutella xylostella
agtggtcataatctctttattatgattgcttcatcaaagataactacaactaatgtataagcttcagatccaattaatgcatttatcgtcgttgtattattgatcaagatagtgatacaagaggcacacatgatcttcaattatcttatgtggtcttttttttaaagacgctctactgctactctaatacactcttgctttgaaacaccgtggaagactatttaacaccatcaacacctcttgtaacacctgggggggtcactctatatgatggaaaacgaagtttgtgttttatttatcgaggcgattgcacgacagctctcggtcgttagtttttcgtcaatatagagtaaccctcctgcatcctcatcatcagctactctcagtatttctccagcacagcctcgatcatggtgagctcgggggcgatgccctcggcctgggcgtccttcttgaagcaggcggcggtcttcaccacgcggctgcactcgtcttcgatgtcgtcgtacttcttctcgcagttgtggatcagcctcaccattgtctctgagagtaggtcacccttggggaagctcttgatgtagtcgtgcatgttctcgtggtgcatgcgcgcgtcgtcctgcatcagctggaacttgttgctcatgcagatgatggcgcagcccagctcgcggtgcaccacctcgaagtcctcgcgccagaagtggtggaactcttccattatttcgccggagaggccggattcttccctgcattcttccagggtctttccaaaatgcgcagtgacatgcgacatgacctccgcagtgcccctcgccgccggaagcgccgccatcatcagaccacagacaactagactccacactgacgccatcttgaattcaacaaccggatgttcctcgaacaaatattgacag

SEQ ID NO: 1229 - DNA, 1053 bp, Plutella xylostella
cgccacaatgttcacacagaagaagggcacccagcacagcaggaacactcccatgatgatgcccacagtgacggcggccttgtggtccgacacgtggtacggggacgagtggacgtgcgtgtggacgcgggtgcggactgacttgctccggttgtcgggcagttggactgttcgggtgacggcccggatggacttgacgtgcttttgtgcgtagcagtacagtctgcagtatatgctgatcatgacgatgcagggcaggtagaaggagatgcagctggataccacggcgtaggtgggcgtgagaaccagcgcgcaggtggggtagcgcggcggctggagcgtcaccgtctctgcttcttcgaggggcctgtgcagccccagggagatgggcaggaagctgatgagggcggccagcagccagatcatggcgatagtcacgatggccaccttgcgcgtcacccagcgcccgtaccgtaaagggtccttaatatgtatgtaccggtcgagcgagatcgcgcacaggttgagaatggacgccgtggagcacatgacgtcgcacgctacccacgtgtcgcagaactgctcgccgaacacccagtagccaagcagatcattgaccccagcgaaggtcatgacagcggccgccaccagcatgtcagcaatcgccagcgacgccaggaacaggttgccgatgcgtctcagccctcggtcggtgtagatggcgacacagaccaggatgttgccggccacgctcaggaatatgaggagggagaggaatatgccaacgagtaatatggacagtagcgtgactgcgtcggggtcgtcatcgtcgtcgtattcctccaagatggcgctgctgtcgttcgctcccagcaccacataggtaggtagggcagacacgtactccatcttatgcgctgcgcatggcgctcaggtctcgtcgctcagcggccggcgcccgcgcagctcacgcggccacgagtcagccatcttggatccgcatcacaggtctgcattccatgaaaactttttgccgccacaatccaaacttca

SEQ ID NO: 1230 - DNA, 2088 bp, Plutella xylostella
tcacataatcgaaaacaaccgatctgtcaaagatttctatgcgcattatcaattttggagcactgtatgtcggtggtggtacgggagctgttcgtgatatccactctggaattttctaataatgataagtaatccttattactacagaatagcagatatgataacaaaaccatggcagagttattttaccaaccctaacctcaaactttatttcaacacaaataaatacctacgcaacattaatatacaccagaaattgatttaccagtcgtactattgtacctaaaaacaagtaattaaagtacagtctcattcgtacaagttctaggtccatttactagagaatatctactagacccgccattttttcttccagtgacagctccccttataaacaactctttaaaggtctctctaaactgcctagacataccgcagtaaatagcaaaattaatcggatacgaaactatgatacagaaattcgttataagtataagaatattcgcgatatgatagtctaatatttcaacaattgtgctactgatgatatgtagtattgtgacaacagctaccggaatttcgaccaataggaacacagttacaacgactatcaacattagggttgtgcaattcgaatctcgaagtcttttacattcggatttccggttgtctttgaatagtttctgtcggttgatttgtgctttcttcatggctcgaaacagaagaacgttgagcacgactagtgatgtgcaggggatgaggtggacgaatagtactcggaacgcgaagtaagctatgaagtacgcgtctagagatatcgtcttgacccatggcgccatttccatctggcacacgtccttaagctgcccccgccacacggtgacgtgcggcacgtaccgcctgtcgaagaacctcggcagctgatgcaggaaggccgccagaccgatgtagatgaggcacttgatgacgcgaggcattgtgcaccaggtcctggcgacgggcgcgtggcacacgtagatgtatctctggaccgccagcgcgagagtcagccagatgctcgcagtgtggaacatcgccgggatcacctcattcatataattccacgcagtgcaggccggcggcggagtgagcggcttgtaatggtttccgaacgtgtacatgtagaacagccagggcgcggggaacagcatggtcagcatgtcacacagagccatggccatcaggactatgttcgtcggagtccgcatgtgtcgacgcgataagaccaccactattagcgtgttggctacggtcgttgttgctagcaggaatggggcgatgtatccatacataggctccgcataattgataggaaactcgcacgtcacatttaaatacgtgtgcgacaaatttgaggagcagtagtcgtcgtatcgagtgaagttagagtagaatgggccgtaatccgattggttctcattcagactgaagtttgcgcgggagtaatccaaaacgtcatttgtcagaatagcgccatctagcgactgcgacttgaagttcacgcgcgaagtgtttgctagcgggtagaagtcgatccggtcttcggtgtccattttgtttttggtgacagctgtcagtgtcacatagttttgaggttatgttcgtggcgtcacatggttcgtgtctttgtattatttcaaatcaaatcaggtgaagttttacagcaacacaattatctctgtttgtggtttcttcagaaattctccttgtttttcttcaggtagaacaacaaccggatcgcctcacgcccgctcgaaacccatcacaaaatcgaatcaaaaacaatttccctttcaaattagcacagcggaaaaaaacaaaaattaccagaaaaaaaacacaacctctccgcgagccaacacgaacactggccggttacaacaaaatacagaagaagaaaaacaatagccaatcactgcacagttctgcgaacacggaacgtcatctgtcaattacgaaaacacgcgttgcaatgaaaattttggggggaaaatgtaggacgatttgacagctgagttttgcggcgcgcgcgatgacctcctcgctcga

SEQ ID NO: 1231 - DNA, 1817 bp, Plutella xylostella
tttctatgttttaatgaaaaaaaaacaactgacctagagactaaacagactagagggcccaacaacagtaatctacagttctacaacacttgatctacgcaaaaattacaaatcttctacttggtgtcttatgatgacaaccacaaaacaataatccatcccatacagaatacatacctacatattataaataagcagcaatgcacctctgcctaccccgcaagggagtacattagtacaaggcgtgagtgcgtgttttttataaatatgtatattataaaaaaaaaactattaaaatcttgtactataatgataatactaaggaaatcatggaattgtttctctttaagattacacataaacatctaagatgcttacatttattgaaaatgatatcttttaggtgaaaactcagggcccatttcataacttacaatgctataaaataaagtatcatttcgaaaacctgttgcaactactctcaatcttttgctgggtaataattataaacttagcaactggaaatgatcaaaatgacagaaagaaatctaaatctattagcaatagcaatgatattggaccaaagtacttgttaaggcaagaatcgttgatagtggaaccatgcatagattagagagccaagttaacaaatgtgctgataaaaaggttaatgtggcctagacttcaatgaagaaaatgaaaagttttatgccactcagtaaaaatgtagtatcatttttagcaaggaacattactactcccactctaaccccaacactacaccagtgtgaagacgagatgagtgcagagatgttattaaggaaccaatagaatttcgtaattgcatctcattaaagaaagttcctcactgctcatctaatctcctgcattggtggagtgtgggcttacaaggattttcagtttattccactggttgtgtattaaaaagatggcagaccaaagagttccggctgaaacttggctaagctaggtaggactatggtggcgtgagtggtgagtctcttgtccaggtgagggtcgggcaccatcactgactgcatcttggccgctacagctgccgtcacaccgtgcggtgagtcttcaaagactagacactgttctggcttaggtttatcagggaacctggcagctgctattaaaaatatatcaggatgtggtttcccaaacttcacttctttatctgtgcttcccatcaccatatggtggaacaatccaaacagttcctcatttccggctacttttgttttcactgatctctcacttgatgaggtagccagtgcaaatgggactttggttttgtgaagatgcctaattagcctttctgcaccatccaaaagtggtgtattagccagcatagtgtctccaagcttcaagagttggtcccggaactgctcaggagacacgggcaggctgagctccttgcacaggatctcggacagcctctgttccgtgcccccaaggaccttcatcatcagctcatcggtgtactcgtggccgtacttggcacacagctgcgttatcattttcttgtacaccagctcagtgtccaataaaagtccatccatatcaaatatgcaatgtgtgacttttttgaaagttttggtggacaggagacgactgccaaacaccttagttgcatttttcatcaaatagaacctcattttgccggtgtatgttatgtaaacaagttcccctgtaaattagacacgtacagactttgataatagttaaacaaatacaaggaaaatatttataaaattgtgtaatgtacaaaaaaagtacctcaaactcttaac

SEQ ID NO: 1232 - DNA, 1052 bp, Plutella xylostella
ggctataaaactatacagtttcacatattcgatcagcacactccgttactcgggaataccttaacttctatcaagacctaagcgtatttttgcatcttcacacggaaaatgcgagaacacgccagcgtcttgggtaactaagagttactatatcatatagaagttactacataaatctaattatacatttctaaaccttaatgatgtttagttctgattgtgagggttttgccgtcgagggagatggggccagcgttccaatgacgcagcagatttccgtgctttccatatgtagacccttggatgttgacatacggagacggggacggcagccataaaggctcaatagcgtgggtaagaatcggtgccggcgcaatgattggctcagcgacaatcggcgctgggtagtgaataggagcgatatgttcgacgataggagcgtggataggtgcgatatgctcgacgatcggagcttggactattggcgccacatgttcgacgacggctggcccaactgagtgaatgttggctccaatgcgtttgacaactgcgttgaaccctctgagcgggtcggcagtgtattctacaaggcggatgctgccgtcaggttccaccagcgagtaggctcccttcaccacgtcgccgtcgcgcgtctcccactgagccttgttgtctcccgtcgaagggtcgtttacttcgtagttgtaaccgtagcttgggttcgaaatgctgcctacggcggcggctacaggtgcgtaggcgatggggtagtgtccgatagggttagccgtcacgtgggcagctacggccaacaggcacgaaaccacaaagtatgtgttcattttgatgagttggtattccactgagcaactgaggtgcactgtaaattgaaaatcttcgtcccccttttatatactagtttaatgtattaaattatacgacgtacgacccggcgacgctccggttctgtcaaaactcttattttcacggatgatttccttaattattcgcaaaattttaccaatcaatacataacactaactctgctatta

SEQ ID NO: 1233 - DNA, 2021 bp, Plutella xylostella
attataatttactcttagggtgaatttttcacaccaaaaaattcacaccgagcaagaaagatgttacacagggtaaatgatcttgatgagcctgctcatagtaacaattgttacattaaatatcgatatacatgtggatttactacaactgcatagcactttttaaaagtgaactaaaattaaattcctactaggtcaccatgcacacttcatagcacttacacatactgcatagttacataacagctctctcaatcacatgatttggattccacagcttttacatgattttcagtgtcctgtttagatcacttgataataaagtacaaggtctcactcccaatgccacaaaggttaagtattgattaaataaccacataacaacaaggtgaaaatctacaattttcacaattaatgatcactaatgaagttctctattccaacattatcaataattttagttttagacattaattagaggtacagacaaccttggcctcaaaacattgaacgaaatgaggttgttacataacacacacactggctggatgagtgatggtcacaagcaaatatatttagaaaaagatctaaatgacataaaatctacatgtacagttatgcaaccttttcagtgaggtgtagccaagcattatgtaatacctaaccattttaataaaacaaaatacatgttggaattggtgtataacgcttttatttaactaaaaataagttactaggttaattccgcgtctaataatacatgatttaggggagtggctatctgtggtgatttggaatcacaataaattgaaattatggtaacaattcttacattagatttagagaagcttcttgatctcatcgtataacaccaatacgaaggcacctccggttcctctgaggacgttggagaaggctcccttgaagaaggcgccggaaccctcggtcttggcgatggtggcccagcagtggagagtgttcttgtacaagatgtcgcccttggcacggccagactgcatcatcatgcgcctacggaccgtgtcgaagggatacgagatgataccggccacggtggtgacagtctgcgcgatggcccagctgatgacaagtggtgtgttcttggggtcgggcagcatgccacgggctgtgtcgtagaatccgaagtatgaggcacggtagatgatgataccttgtacggacacaccgaagcctctgtagagaccggtcagaccgtcggacttgaagattttgccaatgcagtctccgagacccttgaattcacgctggccgtctcccttgccgacgtcggcggcaagacgggtacgggcgaagtcgagtgggtacacgaagcacagggaagtggcaccggcggcaccaccggacgccaggttacccgcgaagtagcgccagaactgcgtgttcttgtctacgcctccgaggaacacctgcttgtacttgtccttgaaggcgaagttgagcgcctgggttgggaagtatctgatgacgttggcgaagttaccacgccagaaggagaggagtccctgctccttgggaatgcggacgaaagcatctacgatacccttgtagcgctggtcagcggcgatctgtttgctgacgtgctggacttggagcagcagcttgacacgctcgatgggcgcgacggcggtcttggaaaccgcagcggagacaccgccagcgatgaaatctttcgcgaacgcgaccggatcagcgaggttggacattttgttcggttaggtgggtgctcacttggtaattacctcgcgggtcgaggtggaaactgggtacacacacggaatggaataaatcacgaaacacgaacccctgaattttaaatcaggagatttagagtaatttcgtgatctcgggagcacagggggtaggtgtgtgccttttttgaaattcgatcgatcacgttctctcgcagttctgcccggaggagcggcgcaaaagaaggaaggaaggggcagatgttaccaaccgcacggaaaagcaccacgagg

SEQ ID NO: 1234 - DNA, 3644 bp, Plutella xylostella
cggtacttgcgcgggcgcgacctgcgggtggggatgttgagggttaatcaaggtcatgttgagggaggttaatgtgaaaaatgataggagtaagatcatagtcagagcccgacccgcttgcgttggacgctgaaagagatcgcgagcccgagcgagagcggtaattgcgcgggcgcgacctgggggggatgttgagggttgagtggggttgattataagagtaggatcatagtccgagcgcgagcgctagcccgagagggagcggtacttgcgcgggcgcgacctgcgcgtggggatggtgagggttgagtggggttttgatgatagaggctgctcgtatgaaaatagagcatcatggaatatggtgggtatttttcatgaggaaagcgatatggatgggagttaatgtagttggtttgttggttgttagttgattgggagttaatggaatggttaactgatttttttatgcgcactggaagccataaatccatttgcattataaactcggtcgtacatattagcttacacccataaaccatactataaataacatgcaccaccaccttatttatacacataacattacaaatagcaagtagctgttcaccatgtgttgtttgttacacatcacatttgactcttcaacattaccataccattaaatacttgagcaccgtaaaattgttcattttacaatccttcagagctcaagtattaaatcaacactactttagaagccatgctgcccaagctacatacatgctcctagaccttttatgtgatcttctgtcgtcatcagacgacggcgacgagtgtcgcctaggcgagggcggggagcgcgggcggcgcgcggagggcgacggcggcttgatgcgagtcacgaactgctccgggcggccttcgcctaccgacatgggcgtctcgccttcttgggccaggcggaacgagccgaacttgtcgagcactatgttgcctttgcggaccggtggatggctgggctcggtgccgggcgggtcgggctcgcggcgcggcggctccttcagcgccatcgcgcgccgcaccgacacgttcttgtcgccgctgcctggagacggcttaggtgggtcttgtgaatcgtctgagctgtcttcaaatgcataacgttctttgtaccctttcgatcccggtgtgtccttcttttttaccttgtctttgacggcgctcatggacatcttccacttgggcttctcgagcggcggcggcggcacctggtcgggcgggctggcggagcgcgcgtcgcgcttgttcatcacctccttctccaccatcacgtggtacgcgctcagcttcgactccagctcctctaggccgtgcatctcgtccattatcctcttatcagtgtgcttcctgtcataatcaccctcagagctgaggtctctcttagatttccctttcagttcttttcttatggcgtctctcagttttttgtctccgatattctctaggttgtaatcgccgctggctgcggctcgcgcaagcttcgactttctcttatcttcgcgctcttgttccttgcgtttacgcttggattctttcttctttttcttgtctttcttcttcttcttctttttatcatggtcagctccgggctgcggctgctggcccagctcctgcatcttgcggttgcgcttgtacgtggccgtctcctcgaggaagttgcgcactttgtcctcgtagtctgagtcttcttttgtcatctcgaggaatttacggaccttcagctcataatcgatatcagcctgcgtcctcacaggcggcggcgcattctcctcgaccggcggcggcggcggctggtacccgtacgggtggttgaactgagagttgtgagtccgtgacgcagagtcttgttcccccaacagccgcttagacagcggagatagcgacctctgacgcttgttgtgtgaacgggagcgacgcttcttcttacggttaggaccttcagaatcgctggtatccgaggaagaggagcttgagtcggacgaggagctggagctggatgagtcactgctggaggacgatgagctgctcgaccgcttcttcttacccttaccacgcttcttcttcttctttttatctttcttctctgttagattcaacaactgcttcagagtttccttcatctcaaatgatttagcactggtcaagcccggcaacagcaactcagctggctctatcaacggcttggttgtggacgtcttgctttttagaaagtctagggaattctgagcttcctcatggaatggtataatagctaaacagtcttcatatgccttttgtgcctctgttatcttgttctcatcttcgtagcttcgccctagcgctaccagtgtctctcctaaatactttctagcattggcatggtttggattcaactttagtgatgtctcaaaatcttctatggcctttttgaatgttccactgttggcgtaaagtgcgcctcttgcgactaatccctcaacgtttcttgggtcgatgcttagtgctttgttcagacattggaatgcctcagagtgtctccctgccttgaaatgctctatgccttctgccactgagcggaatgcccacttgctagcttgagcttgacgcaattcatctgcataatcagttggtgaaaatcctcccctcaaggatgaaaagttggagcagtgcatgtttgatatcccgagcagttctgacagatattggatgcagttggggttattgaagcccgggctcttctccagaattgcttcgtaactttcacctttcatgtccactgtttttttgtatatgagcgggaagtcgtcagtgctcaggaggcccaagggaggcttagggggcgggtcatccgggccccgggtcactcccttcatgcccaccaccattttgtcagtgtcggggataacttctaaaacttcgcagcagacagtgtcattcatcaggtagtatcttgacacatttttcttatccacagcttgtatgatattagttactggtaggaatgccttcacattgatatcagctacatatcttgaagtgggtcccgcagtgcacagaacttttagcatcatcccagaagtagtcctgttgatcactgctccaataattagctcaccagtcttcacattatcaaagaaatgcctcagcctcgctgatttatcaacattcaggaatgtctcgaaaggaggcatcagggcatacagcttgtcttcaggagtggtcgcatccgcccctaaagaagacgaagatggggtttcttccgtcaaggagctatcaaacagtacgccggcctccttggcgatgaactggtgcagcttgagcctcttcccgcggtcctggaacgtgaggtgcttgtgccgcgcctggtaggcggcgaagtcgagcgcgcccacgccgatcttggccaggtcatcctcgcctctctccgcctcccacgttttttgaagctgttgaccatggtagttgatggactgcgccactagaggcgcgtccagtgtgttgtccattacggacttttacaaattccgttgtacgacacttttacgggttttatttgattttaaaattgcacaaaattcaaacaccacaacttatttcaccaaaaacaaaatggcgaatgaatg

SEQ ID NO: 1235 - DNA, 1258 bp, Plutella xylostella
ttttttttttcacatccttaaatttattaattagcataatattaattacaatctattcctccgcacaaaacacatactacaagagtccctgtcgcttcaagtcctcgtatgtcttcctgttgacgacgttcccgagcgagtcttcgtactcctcgtcgttctcggcaacccaccgctcgttctccttttgctgcttgattttctcccaaagcgccagagcgtcctcgatctgcgtcacgttggcgaagtgcgccgtgttggggatgccgaggcagcgcatgccgtgcgcgtgccgccactccgcgaagtggcgctggaacgccttgggacccttgtaggtgtagttgccgcatatctcgcaagtgtagctgatgttgagtccgtgcagcttgtacagccagtacgggatcggctttccatcccaccccaatggcaaattcttcgggttatacggcacactgtcatcgtcactgtccgcgtcgtccgcgctctgcgcgtcgctctcgtcgccgctctcgtcgcgcctctcgccggcggcgcgcgcttgtcgccgcgtcacgttctcgatcgtcgccgcgcgttccgctgacactgttgacgcgaatctgtaaacttgagcttcaatcgccgcaatgtctttgtgtctgtgttgcgtggacgccttggctttattcgcgcctttcttagccactagcgacttgtccaaggctgtctggcctttcgtactgaacaatctctgagcgcgttcctccaaagtgcctccacacttgagtcccagcgccatgagcgctgacttcagtctgtccagaccgagggacgccaactcttcccaagaggagaatgctgagaggtccaagtgagctcccacgttggtcaaggcgccgcctgtttctttcggccacccagggaaggtccctgcgtcccactgcctcacaaagtcctggtgagctatccccagctcctgcgcctggtccagaagcggcttgacccgactcacgaagtccttcagatatgccagcagagccctgatgtagttgcggtattcactgttcttgcgctcccgtgggatgtcgaacagatggtcgaacaggcccaggtatgttatgtagtccactttctctatgcccttcaggttgatgaacttttcgtagcactcatgaaggtccaagtattttccatatccttcttcatccgtgaactccactggagtggtataatcttcagctgggttctctcttatattggccaactcttcaaa

SEQ ID NO: 1236 - DNA, 696 bp, Plutella xylostella
tcagtttctttgacatgttgactttgtttttttgctaggcaatggaaattatgaatttaggaaaacatgaaaaatctgcttttaatttaatacaactactttatttacactattataattacaaatctagataggtttatgtggtagaagttgcttatttctggaaaggataataatccaaacctgaattgtaattaaacttgtatgtgaatttgttgacctgagttttgccctcttctatcatgttctgtacttccttgcggtaggcgggcggcagcaactctttctccagggtacagttggtattagtttcttctgtcgctttgtacactctttgtcttatgatatccacatctctaccatattcttctttaaggtcagctactactcttgttggagtatcgattttaaacacgaaatagttcgcttcccgatgcacaactccatgggcactggttttgtaaggcatcgcccgaaaacccaaattttcaatgtttctgattattccaccacggctaaaaatgtggtgtgaaactcttttgagcgtcgttttcaactctgcctttggcatagtacgcaacattaatgctaattcgtaagtcggcattatgtagttgtaattttcacttttaaaataattacctctgaatttttaggttagaactaaaataataatggttttgacaggtaactcag

SEQ ID NO: 1237 - DNA, 1380 bp, Plutella xylostella
atgatataatatttattgaatataaatatagagaattatttggatatccacactcgaatattgttaaacaataattaatgcgctaacgttaccaataacattaaaactaccatctagactacactaagtgccggggggcgggggcggtccgctgttgagccagtgcgggggcggcgggtatctcagggcaggcggagggggcgcgaactggtagccgctccacatggggggcgcgtgcgggggcgggaacatgaagggcggcgggggcggcccgctgtccgggccggggtgcgggggcggcgtgcgcatgtccgagggccagccgcggccgtagcccgggcgcggatacatgggctggttttggttctggttgcggcggttgctgttgccggagaaagggttgcgacctcggcttggaccgctgccgaatcggctactagactcagacggcctctgcctcctcgcctccagcatcttcctctgcccccgctcctcgtcccccgccgcctcctcccccgcccccgccccctgcctcgcctgcttgctctgtctcttggcgcggcgttcttcttcgtcgtcggagtagtcgacctggtggggcggcggctcgatgtcgtttagccaggaggcgtctgagcctttcactttcatgagctcagctaggaacacatagttcgtgtggtcggtccgtctgggcgcgatgtacacgtcggtgccgggcgccgcgccgcgcgccgccgcgtgcgccgccgagttgaagcgcacgcagtagtggggctcgttcacaggtccaaaaacatcaaacacttttcccaaagctttagcaccattatctaagaataaaacactgtctaaatctacggcaggagtgtccggcagcgcgcggactatcactaatctatcaacaatactagctatggtgccaatcttggtggtctcctgtgcgggcaggctgatggcgaggtcctcgatcggcggcaggtcgtccagacccagctccccgtgcaccttcaggggttccgccttctccggcttggcttcattttcatcaccactggacaattcctcgatgtctttgacactgtctacatcactgtcactggaatcagagtctgaatcactagagtccacatctctgtactcggtcacctcgtactccaccactccgctctccgcactatctatgatcatgtggcgcgtggtctcctcatcttctcgactgctggaggccgacagcgggccgtgggcacaagcatttataatgttattcttcaacaccatctcgctcatctccgccgcctcctccgcctcgtcgttccccatgttctcgatcgatggcgtctccgtgtcatcggaatccgagtccgaagcgccgtactc

SEQ ID NO: 1238 - DNA, 2988 bp, Plutella xylostella
gggggcgcgggggccggctcgggaggggggagggacggcgtcatcgcgatggagaggcggtcctttatacgacgcaccttctccagatttctgaacaagaagcagtgtcgatctttgaccagattcctctcttttgccgtcaacggcttcatttgaggctcctgccacaacttgttcagatgttgctggtactgaagtatggtcatattgttactgtcacagacggatatcgtctgctgttccaacttcttgttgcatttgacagctttgcgcggtctcccgacgcgcggctggctcgagccctgtgattggctgggcgcgttgccgccgctccgtgattgggcctttatcggcagcttggtgatgcgttgtgatttaccgccaatcacgccccggcagtcttcggagtcgcatttgcatggctgtccgactgcagggttgaacagggagaagttgtagtcatacgtcaactcctcgcccggctcaatatcccggagagcgaacaacgccattctgaatgtaccattagaggtccacttctgcatctcgcagttgggctcgcacgagtggttgacgaagcgtccgtcgccgcccatgcggtgcccgtcgatcaccagcccgccgtccaggtgcaggcagtagtggtgcgtgtcgcgcgcgtagcgggtcgccatgcgctccttgaactccttgtcagacaccacctcgcccacatactccagtatgaagtcgccggaggtgatggcggtcttggtgcgcacgccccagcccttgtgctgcgtcatgaagcgctccagcccgcgccaccactcgtgccgctggatgcgctggttcttgcagcggtcgccgcacggacacagctggggggagcactccgagaacacgaggcggttgatgcagtcctcgttgcacccggtggacgccgagcagtggcacgccacgctctcgcactcgtccgctgatggcttcacgtcgtagtatacgtttgtccgtatcttcttataattccacgaaggcaccggctggttgtagtgctgctgccaccagatgtcgtagggcagcgtgaagtgtctctgccggcggcggacccagcgctcgcagtacggcggcggcgccagcagcccgggcgggaactccgtctgggttactaggttcttgcctttaccttcgggctttggatcttccttgtaatagtctgagaagagtccagccaccaggaacttcttcctgagccgagggtttctcttagacacgacgggtgcgcggtccacgctgctcgcaggactctcatctctagacactgccacacgcttcttgcaaataacactcttagacaacacgtctatactcttctcgaagtctatttccttctcattcaacggcaacgggtcgttctcgatctgatgcaagttgtccagcggctcgcgcgatattgaacggaccttccgaccaatcagcgtttcgagtgaactgtcccgtgagctgtgtaacattttcttgttgatctgacaggatctcgacttcctccttgcgattattccggctggcttgcttgacggcttctcgcaggtcttcacttccgatgtctgcttcttgttcggtttgctcttcggttcatcggtagtgacatcgccgcttcgagtgagcctcctttcgctcggacataggaccgccatactggatttgggccgaagaccgagtttgggggttttctccactatcttcttcttggagaagatgatgtcctcaacttcttgggaaggcgatagggctctagacttccgcttcagtcggtctgcggtgtcgatgcgactgcttggtctgtcggacttcagattcagtagactcaatggtatgctgtcttctgggtcgttacccatagagctagctagggatggtatgctgtcggtttcactaagaacttcccatttgttgacgtgatttttattgatttccttttcttcctgcttttgtttcagctgcaaggccggtgctcgaagaattgaggtgcttgtgttcttcttatcatttacaatgttctctgtagcttttgttgactcagctacttctttaccttggagtttttctaaggccactactgttaggcgaccttgctttggacattcgtccttattcaagaccactttgagttcagttttcttattagctgttcgctccaagaatgtgtttgtagcttcaccatccttcggcactctttcgaatgctgatgaattatggtcggtgtcttcagaggccaagtgactatcggagtgctggctgacgttcacactcggttcaaccttcttcttctttcgcttcacactggggaatccagttctgttgaatgccttacgtcgtctggttttctttttagatggcggctctacaggctttgtgtcagtctccttagtcacagatttttcagcaacaactgcagtcttcttgtttaactccgaaataggcagtctttcggcttggactttcggcacgagtattttgggtggcagtaccagtttgctttccctaatgagattaccagatgttcttttcttcttcttttcgttggcatcgtcgctttcactattcagattccgcttagcttgccttaaattgtgtccgccggtagtttctagaatcttatcggagataaccgccgcaatcgactctcctcttttaggtctatttagaattgagtcaggtgtttcggatatcaaggatagaggtagatcagcctcgggatctgaagggctcgagggttttgagttcttgctatcggaacatctcgccttagacttagatctgctgtcgtgcatgatattgctaacgcaaatggacgacttaggtatttgatcctcaaggtctattgaaggttcgaatattccggtcggtttatctacattgatcacgagtttttgctccacgtacggttcagaagctttggacttcttagtttccaacagcttgcctttagacacgggggatttaatg

SEQ ID NO: 1239 - DNA, 1173 bp, Plutella xylostella
ccgctctttatcgccttcgggttctcctcggtggtcttgccagttctgcggtcgcacttctccttgatctcggcgaacttgcaggcgatgtgcgccgtgtggcagtccagcaccggcgtgtagccgttgctgatctgtcccgggtggttcagcacgatcacctgtgcggtgaagtcggcggcgccgcgcggcggggcgttcttggagtcgcccgccacgtagccgcgccgcagctccttcacagacacgttcttaacgttgaagccgacgttgtctccgggcacggcctcctgcaacgcctcgtggtgcatctccactgacttcacctccgtggtgatggccgccggggcaaaaaccaccaccatgccgggcttcagtatgccggtctccacgcggccgacgggcacggtgccgatgccgccgatcttgtacacgtcctgcagcggcagacgcagcggcttctctgttggacgggacggcggctggatcgcgtccagagcctcaatgaggcacttcccctcgaccttgccctccttgcgctcgatggtccaccccttgaaccacggcatcttgtcggacggctccagcatgttgtccccgtgccagcccgagatcggcacgaacgccaccgacgccgggttgtacccaatcttcttgatgtacgacgacacctccttcttgatctcctcgtagcgcgcctcgtggtagggcggctcggtggagtccatcttgttgacgcccacgatcagctgcttgacgcccagcgtgaaggcgagcagggcgtgctcgcgcgtctgcccgttcttgctgatgcccgcctcgaactcgcccgtgcccgccgccacgatcagcaccgcgcagtccgcctgagaggttccggtgatcatgttcttgatgaagtccctgtgtccgggggcgtcgatgatggtcacatagtatttggccgtctcgaacttccacagagcgatgtcaatggtgataccgcgctcacgctccgctttcaacttgtccaacacccaggcatacttgaaggatcccttgcccatttcctgggcctccttctcaaacttctcgatggtacgtttgtcgatgccaccgcatttgtagatgaggtgcccggtggtggtggacttgccggagtccacgtggccgatcaccacgatgttgatatga

SEQ ID NO: 1240 - DNA, 4606 bp, Plutella xylostella
gcgtccccgccccgcccccgcgcgcgcgtccggggcggggcggggacgcgcggggccctcgaggccgcgcagcccggcgccgcggggcctcaagtcgccgctagggcgccgccgctgtctacaccaaccctgtggtatctacgggaaccttaattaataatgaaatttttttcatcgactttcctaggggcgtataagttttaaaagctttacattcaaaagtcttcacaaaattgtataacttaccataatctatgttttttttccaattaaaaagataatatgtttattttatttatctcttaacactacaaaataattcttcactaataatgcagattttcttgcagtaacaaaaattaaacgtctttaatataataactaagcattttcgtatagatttgtggagaacagttgaatatataggtacctatgtaattgttgtaattgttatttaacatactaaataggttggctaaattacaagaataggggtagttcaattcccagtatcgcaaatatttaaatttattatcctggattattataaaattatatcatcatataatgtactgtataaacaacaaatatcattattaaactttaaaaataatttataaaaatttgctacagtaaagtaaatattaacttataacaaaatcaacaatttaactaacaacgtaacattttgtaaatattttgttttatacatatctatagtgacgtcttatgctcaatatccgtatcagtattagttgctagcacaagtgttctgccatcgtacctactcattttatattaacattagcgtcagctagcaacttcgcttactcaataaatcaaaatgtacattgacgaaatgcgacgaccatcgcgtaagcaatgcgagtgaatgtgaatcaactgggtttgtttctgcgcttgcagcctcctaatgcgccaaccataacctgcctacgactactgttcagaactctttccgataggtcatttaactgctcataaatattgtcacttcttaatatataatattttttatttaatataattgttactattttaacagcggttatcattcaaggaatgattatacaatataacctaaaattttaaacatgtatattgaagcatataatatgctgatgcagtcaaatatcccatcctcagttacgcggaaattttccaccaaccataacgttccgtaatatgtatttagaatatattatcgattatagcccgcgcattcggagtcatcaagctttaacttgcaatagtttcttagacaagactggacaaataccaaggtataggttagattgtaaaacgtttggttatgcctaggtatcacaatgtaaacctcgtttcacagtcatcattattatcgcagatcgacattccgttttattatacgctatgatttgttattattgtttgactatttcataccaaaaaactaatctaacttcacagctttactctttacgaggtatccagtaagtatttattgccgaattaacaaaattataagtaccctataagcttaattaccacaacgttgcttcatgtgacaaactacaagcgaaagtacatgttcgaaaaaatcaacaacctttgaagcacaatcacaggattgatcttaaataattgcaataaaaataatgtagtattcaaaaaatattatgcaaagttttactatttcagggcattaaattccataaaattgtttttgagttgacacaacaatttgtatccatgcgacctgaaatgctagactgcctgacgacgccagatggaaccgacaatatccaatttccacaatcattaaaatacgaataaaacttacgaagacctaattaaaatgggtacaagaatcaaatggcactttacaagatacctatgcgtttttaaattatgtcaatgactaatgagctattttatctttacgttgtgccttaatagctaagttttcgttagttaacctaatcacattgatttagaacatttgttgagtcgtagcgatggtcgggcgggggtgatggcgcctgaacccgtggagtaggaagttggcggccgcctttatgggcgccatgagaggcgcgggccgcgcggcagtctcccagtgtcaaacgttgttggccgtcgggaaccggggcggcggcagcggcggcggagcccgccctccgtcgccgcccgctgatgacttctccgacactgtgagaggcggtgcttccagggaggtttctgatagccaagtggtgtgatgatgctcacgtgagtcgtgtttctcgtctgccggcgccggcggcggtggaggcagctgctgctcgagcgcgttcacacagttcaacatgctgccgtagagccggctgtcgcggaaactgtccctgtcgaaattgctcccattgttgttacggaacagtgccagtatctcctcaaaggtcttgtttttcgtctcaggaacttttttgtaagtaaatatccaaaaaattgcaaggaatacactaaaaggcaggaatgtatagttttctagtagtgccttcatgctagggaacccaattccgactacgaaattggccatccaattaactaagacagcgatggccatcgcgctcggtcgtgggccctgagagaacagttccgccgtgattagccagggtatggagccagggcccaccgcaaagaacaccacgaagctgagcgttgacaccaccgacaggtaactcatccagtctatcatttcctttatgagaaacgagatggtaatgaagatggagaatatgaacattcccccgagcccgtacagatgcagggtcctgcggccggtgcggtccatgaggggcagagacaccagggtcatgccgaccatgatggctccgatacccatggtcgcgaacttggcagactcgtccgtcagaccagaagatgtgaagagagacgtagagtaatagaacacagcattgatgccgctgagttgctgcgacagttgcatgacgacgccgatgaggaggggggctcgcagggtcggggagcacagcagctctcgcatggagatggacgcctcggcctgctgcgcccgctcctccgctcgcatctcctcgatatcctcctccacctgattgctggcccgtaatctgcgcaatgccctccgagcttcctcttcccattggcgcgtgatgagcagataccgaggtgactccggacaggctggcagcagcaacagttgaagaatagcaggacatatcgccaatccgagtaatatcggccagccctcatcagtgccgaggatttgctcgatgcccaagacttgcgagaggagcagccccaccgtgaccgccagctggttgaccgtgcccagtccgccgcgcaggttcagcggcgcaatctcggatatgtacattggcactagcgaagtgttcagaccgcagttgacgccgatgatgaagcgaccgaaaaacagcatttcgtaacagtgcgatatcttggtgaagcccatgagactcgcgccactgatgcccaggatgttgttgaggagcaggccacccttccttccgaatcgattagcgatcattccgcccgagaacccgcccagcattcctccgatggcgaagatgctgacggcgatggagtagagcttgttcacagagtcttcctggatgtccttgccgtagcgatccttgtacacgtccttcatgaaattctcgatgttccggccgggagcgtttatgacaccagtgttgtacccgaattgcaacatgcccagcacggcagccaagatagcgtaggacaggaagaaagttagaccctgttcaagaagcctcagtttccgtcgctgcgagtgttcctccagtcggtccacgtactccctcagttcttcgatctcctccttgacctgctgcaccgtgtccagctcctgcttgatggccaccatgtcccgcttcacctcagaaacctcgctctggcatgactcgacgctcttggtgagctcctgtagctgggtgcggatctcgcacagggccacggtggtctccagctggcggtcgcctcgctgcaggtcgtccagcttggccgtcaggttcatgctcatgacgctcacctggcgctgcaggctaagtaggagttccctgagagtcgcttcgtcctcctcctgcgtcgcatatcgggtcagcttgccgccggcctcccggcttgcatgatcaggtaccactgaaatttgatcgatgggtgagtagatagggggctcctctccccccgtctgttggtgctccagaagacgatggcaagactgtctcatgagagctcccgaccgggctttattggaattattgtcatttcactaacaacgattgttgctcgttaggatacatggtgcctggcgcgaggtgaggggtcgagtcgcgtggtcccgcgcggggctcagggccggcgccggcacgccgcgtgctgggtcgatggtcgcgccgcggcgagcgagctcatggggcagggggcgcggcttgggagcagcgaacgacgagcgtaagcgagcggcgaaggtcggcgtggctccggcctgctcgaggcgtctcgcgcctatactaaagtgtcggtcgatgcggtcaaaacgcga

SEQ ID NO: 1241 - DNA, 1385 bp, Plutella xylostella
ttgtcagtgattagcggaaggtacgtctgtggcttttgaccttgagatggcacgattacgtactgaggtacatcgaattgctttggtgagcctggtgccagaccaaactgcgagttcggtgacccgagttgggggaagcgggggagggcaggcagggcgggagcttgcggggcctggtagggcttcagcgcttgtgacggctcgcacactgttccttgtagtagcacactcagaggtgcggtgtatattctgaagttgatgtcactgtagtccaggtttgcttctaagaacaccggcattctgtccgacagaacccacacgttctcatcatcatcaatcttgacatcactggggaagaccaagccaacgtcatccttgtcaactacagcagtattttccggtttcaagggtttgtttatgttccagcagccaatgccgttctggtcgattaagctgtacagttggactccgttctctccgactactttggcagtggtgtgggtgtcagggcctcggttgccaactactctgaagtctttgtagtttcctttggtcttggtttcgtttctcaagacgctggtggagacggcgaactccgtgtggctggtgagcggactgaagtagagagtgcggaagccgtcgctgcctgctggagacgcggagattccgaatatgccctccactccccagtcgaatgtcagaccggcgatgttgaattcaccaacaagaggatcaggcatgaagaagttgtgagtgaaccgccaagatttgttctgctcccaggagtaggcgatgagtccatatccaagttcgtcggaaaagtatgcgaaagtgtcttcgcaacttttgccttcatcgagagcaatgttagcgatgaaagtggtggggacgatgtcttcagggcggaagacgtatctccggagacgacggtcagttttaagatcatagacgttaagggcgtaaggacaggggttagtaacattgggatcataaccataagtgccaacatccaacacccagagacggtcacatttgtcggctttgattctgtagacggtgttgagtccattctgacagttgccgagttcattgccctcccagctggggtaggggatcaacttgggggatggctcgtacggagcatcgagagggatgtagttcaatgtagccgggataccagcccgccacctaggcacgctgacgaacagcttgttcttccaccgctcgatgccgacagggagggcgttttccgggacaaacgcgccggagtatagcgcctgctgtctcgaatattcatctggaaagttccagtccagggcgttccaggcgtaccgctcctgcagccgcagggacgcggagcaggcgcccgccagacccaggagaag

SEQ ID NO: 1242 - DNA, 2519 bp, Plutella xylostella
ccttcgagtattttacagatatttcatcacgtacgagtataaaacaattaagttatatagctataaaatcaaatacgcaaaacatatttcgtaaaaattacgaacgcatcctaaactttttgctctgtgtcaaacgtgaccacagacaaaactcgcgaccatagacaaacgtcaaatccaacctttatttttccgctcttatgttttgttttttcgacaaaataatttgaaattcgaaattcgaaataccttctacaaagcgccaatatccggatacatatggggcactcccgttccagtctccttatactgcagggggtctgctctgaattcaacagtcttcagcggtagatggccatagactttggtgaagtagtttatacaggctgatcgtaaagtcatgtggcgggcgtcggctgacagcatctcggtgttcgtgcattcgggacacttgaacttctttcgaggcgccaccttaataggcggttgcctggtgacattggcgactaggaagttgatagctatatcctcgcaattgaagtggtcgtcgacccaggttcgaatctcggccggcatcttgtacgtgtagtaccacgaccacagcttgtggtggaacgctgcgcctgttagcaccatggagatctggttggtccactcgctgtggtagcgccaggcggcggcggcggcgtcccacacgtgcagccgcgacgggaaccccacgatgcgggacgggaactcgcgccacacgtcgaaaccaaactccagctcatcaggggtcaacataacgatgtcatcgtcgatcgtcagctggcactcggtctcgatctcgtcgtacgggaaaaatcgattcgacagtttattctctttggtccgaatcactttcagtggcttgttgatgactggccactcgctcgaaggaggcggcgacttcttctggttattccaaaccaccagtatcttcgccaagctgggagtcttcacgagctgcgtgatgagtttgaacaggctctccacgcggtcataggtgaggatcaccgccgtgaagcctggggccttgggcgccgtcacgggcaggaagagggggttcactggaccatacaaatattcaggtaaattccagtcttcgtacattctagcagccaatgggaacactttttcactaattatttctaaagcagtcaacacaattttctgtatactggaaaaatatctttcaaacacccatcggagctgccagaacaattctgttctcctctctttgctcactgaatgcactatattaagtaaatttctaatgttttcttcaggcacaaacaacgcaagtctctgccagtctaaatgcgaactgaatggcatgactacagagtctgctatgactatggggatacactgggatgctaacacatccatcaatgctggctgcacaagtcttgcactccgcacaacaacacaaaacacaccgtcttttaacacttcagggtaactgaacacttttcccgttgcatattcacatcttttcgttgcatctccaacatgtccagcacattcttctagtagtaataagtcatttgatgcggacgctataccttttaattcagcaaggtaatctgaagggatattaagttgtgtggatactatgagatatttcttctgttttggttgtgtactgttgatttttgatgcggttgcactgtatatgggcatggatatgtcaaaaccatatcggaatgtccatgtgtcgaaacctgctccggctactatggccttcccagtgttgaggtccacaactgtattatagttgggtgctgagccgggcaataggttgaatatgaggtggttctccccattattccagtatggcaaactttgtaaggcctgtgccacatgttttgatgaaaatgaattttgattcaatgtgtctatactaggtactagcaagcacgcctcttcaggattcggcgtataatatttactatgtctaattgcatctaaaattaagtaaaactctctagaaaactttgatatagaagtcccatcttcagtcacatatctcgtcagggggtagatgtagatgctgagcttgttgtggtgtctcccgcatctgtacacgtcgaaacagtaccagtatgtacagtcattgatgcgactggcagctttcacagagtcactcttcaaagtaacccttggagcaccatgcatgcttaatttcacaggctcatgataatccttacgcggagaactcccggagaacacattaaataacacacttatcaacaacgatactattataaacacaagtagccccacaaaaaatctatgatacagaatttttctgtacgatttatatttcgagtgcttcccgggtattaacggctctgaagccatttgtgtggggagggtttagattagctgctccggctcccgtatggtacacatagtactaaggatttcatcatttcattcaaaaataatgaattgaataaaataaaatcccgtgtatcaagcgagcgacagtcaat

SEQ ID NO: 1243 - DNA, 1294 bp, Plutella xylostella
tttgctgttaaggatgataccatcgtatttctgttggaaccacttcatagcatcctccttggtcaggcggtgggggaacccaaccttgccagtcttgcgtcttctgtgggctacgttgaaacctggaatttatattaacacccattatttatacaaagtaaaaatcttaacattgacgcgcgcaatgcgttatggctctcatacataaactcgatgcaacgtggcgtggtattgtaaaaacgtctccgtctaacttgcaggtgttccaatgggggagagtgatagagtggcatgacgcgacgtcgtatcgtgtgtatgtatcatttaaacacagttatagtttcctaactattttaccattaaatgagatgtaatttaataacttgtacctaaatctgtatgagaatatgccaaagataaagtaaattctctctagaattagtttaatgttgcacataatttacagagtgtggttactgaaaatctacacccttgaacaaatgtgcagaaacattattcaggcattatgaatccaacattgtggtattctgacatacaggtatttaaaatacttaaaaagtttttgtgtaacttgggtcttgatgagattgatactgataacaaaatctataatttaatctgtactgtaactgtatccactaaaaaaataccttatcctatgggtatttggttttgatcagggattattattagattttgagtaagccataaatctcacctggcctgccaagtacgacgtagaagtcaagaccgtagataccgatggcggggtcgtatttgatacccaagtcaatgtgctcctggataccaaagccaaagttaccggtggctgagaagttgtcacgcctcaactcgtattctcgtactttaagacccctctcgaggatttcctcagccttggctccacggactgtgcaatggacagcaatcttctcattacgacggataccgaaagacctgacagtatagcgggcctttgagaagacgggctgttggccagtcagctgttccaacaccttcgccgctcgtgtaagcctgtcaccagactctcccacacagatgttcaggcacaacttcctgatatgcaggtttcgcataacatttttggagttgtctttaggtgccttcttttctttcttctccttcttcttatctttcttcaccgctggtggtggtactcgcgccatggctacaacttttcaaaagaaaccatagacaacagacaaatctcaaactaaaaagtcaatttgacaacgtcaatgatttcgtgttt

SEQ ID NO: 1244 - DNA, 4315 bp, Plutella xylostella
tgagctgctccagcttgtgcagcagcgcggggggcgcgcggggggcggggggacgcggggacgcgctgtacgcgtgctccacgctcgctgatgatcttgcattttgtgagttctgtgaatcgtgcgatcttccggtggcttttttcagttcagcatttaatttgtccgacttttctctgttttcccgcgagtagtgctcgtggtgcaggtggtgcgaggcgagcgcggcgcgcgcgttgtcctgccacgccatggctcgttctgttacgcattgtaacgcttcgccttctgctagacggactggcagcttttgtagccatacaagtagagccaggatgctctccaagcgtgggcggcgcgtgcggcggcagtctgcgcacaggaacttgggcggcgcgcgcggggcgggcggggagccttccggagactgcgagcgggactcgcgggcgggcgggacgcaggacgcgtggaaccagtccttgcacagctcgcactggttcatcacgccgtactgccgcttctggcacacgcagaatgtgacggacggggaaggagccgcacggacgtctttgcgcatgttgcgggatctagcttccttcagtaactgcagttctcgctgctctgcttgcttgaaagcggccactatttcagccggcgaagactcctcgctgaagttcttgaggaacagccccgcttctaatgaggatggctgagggtcagtcgtggtgcggcgccggcgcgagcgagacgtggtttcggtgcgcgggcatagggcttccattagggagtgcggccagctcttagtcaagaacatgttctcggcgccctgcttccactcccgggccgactggagagcggcactcagctgttccttctcgtacaaggctactgggatggcttgaccctttttgacgagcgcttcgactgtgtggtagtaggggtagtggtctttggactgcatctcttccaccttctgcagccaggccgcagcatgctgagcagcggcgtgcagcgcgtgcgtgctgggcagcgcggcgtggagctgctcgccggctgatagcagctggtgcagctcgtctagtgtcgtgtgggaggaggcgtcggcggtgagcagggcgcgggctttggactcccagtcttctacttgttctttaagcttgctcaaatacgcaaactccgcctgaactctcttatgcgggacgacactattcgcctccgctatcagtctgtcaatgacctccagagtgagactggcgtggtcttccttgtagcccttgacctcgtccaggaacttggcttgggccagacgggcttggagcggggggagctggtccaggattatgcagagttgggagcccagttctactgtctcctccaaatctctgagcatctgtgggtcagtgtcatccagttcttcagacaggatgtccgtggcgcgacgctcaaactcctccgtctgacgtagcacctcctttactgctgatccttcaggcaacaccgccgctaattgatcaatctcctcagcaaacagtcttaactcctcaaccgtcagccggtacttggggtcgtgcgtgcgcgtgcgcgtgcgcatcttgttcaggtccagctgctggatcacggagaggcacttctccgcgtcctcgatggccgtgtctagggctcggactaggtcggttttgtggatcttaaggtcccgcgccgtgtctctatggtgtctcagtcggtccaggtcacaggtcttaggcgtgtctgggtctagggcttccctgaccgcctcggcccactcgcggaacgcctcagaacgctgtttgaggcgctccagtgtcgcgccgagctcgtctagcgtgtagcggtatctgagcgtgcgcagcgcgggcgcgcaggcgcacaggtcggcgtagtggcgcaggcacgccacgctgcctgtgcaagcgcaggtcacacacgacaggaagcaggtggtcttgcacagctggcattggcgggagtcgtcggggaggagttcgaaggcttcgcgctcggcttgggttacgccccagtccaacagccccttcctcagcttcctctcatcatgcagcatggtcctcatatccctatacgctgctaaagccaccaccagactcaggctgttggcttccagcgccatcttgcacaccagctcgtcgtgggagaacacgcagtagcgacgcagggttgagtagtgcgctatgcactctcggcccatttttagccagtcgggcggggtgaagttgacggcctccgcgaagttgtagccctggttgaagcccgcgtggtaggcgcgcgggaatgtgatcacgaattcgccggcgtgctggtccgttctgtagacgggcacgccggccttcatcagtatgttggggttcatgatggtgaccagctggtgcagcaggtctggctgtagctggaacagttcaggggcttcggctttcatggccgcctcgaattgttcggcttttgaacccgggacgccgtaccaagtcttcggctctccccagtgcaggtaattgatggagtagctccagtggtcctcgttgtgccagcagaatgtggcgaaacacatgcccacgtagagccacgggatcttcatgccggagatgtctgcgttgatgtggcccagcacggagccctccagcacgggcaggttgttgaggttccagctggactctgcgtactgctgctccccggggtataagtgggcgctggacttggttggaaacccagagccatgatccatagagtgcaagtcggccccgtattccacggtgacgtcctcgtcgatagaagagacaacgcgccagaactccttctccaccgtcgatgttggcaccatatggacaggcatattgaagtagtccgacttgaactgatcagccatttcgccgaactgttgtagcgtgtattcgcgcgaggcttgctcgaagccaaacgcctccgtcggttttgatacctcagtcgcgatgcacacggggcatctccagtcgcctttaggcacgatgtgaagaggcggcagcagacagaacgtgtggtaggagtcgtcgcagccgtcgcagagtagcatttgctcctcgatgtcgccgcgcccgcagttgcggcacatgtattttgctagcggatcattagccaccagcgggtcccccagaggcttcggcgccggcgtcaccgacaccgtcatgttggacatgcggtgctcgcgcagcttggtggagcgagtcactcgggacccggtgcctccggcccatttgttctcgcgtggactccttcgattctccgctccctccttctgcggggaaatctcttccttcggcgtcaaggcaccttcagccctactgccctcggcattaggctcaggcgagctcagcttgaaccttctagaaggggggggcgtggccgcggggctgcacttggtggctgagcgcctgcgattggctggattgaccttctctggggtctgttcgcctttcacctcgaccttctggaagttgaacgaatccttattatcccccacagcaccaccactcttgaacacatcgtacgggtacaggatccgctcgtagtggttcttcaggatggacccgatgcccttgccctgagggaagcccatgcggcgcgcgatcttcgaccatttgcgctccgaggtgcacacttcgaagccgtcagcctcccgcacaatcttgtgcaacgcatacaggtcgagcggcttcttctccacggtggggatcttgagcgtggagccctgcagctcccagaacttgatgatctggtccaggaagttgagcttcactcgggtgatggcctccaactcattgagcctctggatcctcggggtgaaccgcagccggtccacgtccactgcaaatggaggctgccagtgctcgggtgggataatcttgcaaatcccagatttctcggcaatatgtcgaattttattgatgtacgcgagggggtcctggaactcctcaggtgttggctcgaagacaggagcctccgggggcacagtaaaagtaaaattgtcgggtttcatgggggacgccgagtcccccatattcacttccacactagcttcatcacattttcccattttagaggataaaactactatgcagttctcacaaatacaaaatcaaagaacactttagcattatctgatactaaggaatgaaaagggcacgtccacaaagaaatagtagcatttgcattagtctttccataaggaatcacaatcacaacgagataattagaattatcaccaacaaataacagtgtcgccttgcacgtccgccatgcgaaattgaac

SEQ ID NO: 1245 - DNA, 1177 bp, Plutella xylostella
tttctcttcataaaaatttcacagtcgtaatgtcgtaaaacatagcacctaggaacttataattataaattgtacagcttttaatctcctaaattgcattcttcgataagttacttataattatagtttttatgatttaatattgaaaggggaacaagctctcccataaccggaacctttcttcaaacagtctctctcggacggtgatttgattccctagccgcaggtacttccggccggcgggtgtcatggcgggccacgagatgttggctatttccggtatgtcgccgcgggggttcggatcaccgtatctagcgaaggtgctccaaagtcctgtcatgatgtccacgaagggcccgtgcttgctctccgcactgatgaagggaaacgcgtagctcagactgaacaagtagatcaggtcatcgtggtgcatcgctcctataggtctgttagtctgcggatccacgtagtggctgctgtcgcctacatacgcgaactcggagtagaacaccttgtggggggagtacttcgacatcaggttggcgagacgatgcacctcaaacccaataaccgcatctccatacagagtgcccagccctcgcgcgctctgctcatcatcagccagcggccggtcgttgaggtacgccttcctgagagcactggagacggccaatgagggtccagaacggtccaggatgaaggagatgggagctatggcggtccagttggagttcatttgggcgaggagggtggcgtttttgaggaccctaaaagccttccaataaaactcggcctgcgtctggctcacgacatacggcacggcgtgcatcctgccgctcttcaccgcgtccgccgggtcctcagtgaggaagcgctcctggcctagagggcgctcgatgatcggcatccagagacccaccgggtcgtagtcgaactcaaagaatccacttaacgagtcgccgatctcccgccaagtcttggtcctgagacagtcgacgatggcccggctgctgtcggtgggacagttcagcagctcggcctgcctcaccgccaggggccgcaggtgccgcggcgtgggcaccttgcggattggtgaccccgacatggatatcgctcggtggaataggcctttagacatgggcgagatcatgtgcaacagcacactataggacccggc

SEQ ID NO: 1246 - DNA, 5031 bp, Plutella xylostella
ccttagcttttatttatgtaagaattatggatacaaatcacgattttatatcaaatatttttaaaatgtcgtgatagaaacaggaaattgtacaattttcttaaaagcagtctcgatcgatgtactggagtaccgatcggccacgcggctgtggtatatataatggcttattcttttatataaagtaaaaaggcaggcacgtttatcttaatatctaaaatacaattgtaacaaaactcaatccccttacacataatattttatcacaacttgtgatgatgcaatggctacgcgacgggcagctgccgctcggaatatcgcaatagtgtcgtttaaatgactaaacgaaatataattgcaaaacagtaaatataaaattaaaaatctcttaacaaaatctaaaaaatattgcataaaactttcattcaattattattacaattattatttactgaattatacatttcggtttaaaagaagtgcgcggtgaggtgtcataatcttcacctaagttttcatatcgtgctttgaattactctggacatcataattattcaaattgaaatttaaaccgtgctaacgcatcaactatcttctacaaaaatattttctactcatttacttgtcaagtgtacattacctattacacataataaaaaaagaaaataaataggcacatcacattcataacgaatgtcttaaaaaacttaactatctatgtcggtacattaacttaaacaaaatggtttactaaattaatttgttaacaatccacaatttgattgcagctcgttagaaataacttgtatggcttcaactgttttgtactcaaataaaaataattgtttaaaacttcaagctcgctgttttcaaggtgaagtgtgaaatatactcatcactcattggtgctcaaaaactaaatgcgaaaccaattcgttagttttgtgaaagttcgatttttcagtagtatttgaaatggatactcaaataaaataatacatccaaatgtacttacttaataaaaaaaaaacattaagtagcaaaactattcatacaaaatgctttccttaaaatattaataatattttgtaaacggaggggataaaatgttaaatatacttaataatttacaactaaaaacgcgatgctctgttaataatattgtcataccttatacaaatagaaagcattaactatattcagtaatttaactttactgtggcagttcttcggctgtccacgttaagtaaccaaatatttcttttgaagtacatacaaaaacagtatcaaataaatcttaacttatttaaattaaggtggatgaattcaaaatagcactttgatttatttttttaattctaccaacacgttccacgttcaaatttcgaactttttaatcacaaaaaaattaatcaaagtggtctttcttatctgtgttgtccttagtgtgtttcagtgggggcgggcgcgggcggcacgggcacggcgagcggcgtgcgctggcggtcaaacatctccaggatcagcttggggtcggtcccggccggcaccgtcactgtgcccgtctcgatacgcgtgatgactccctcctcgcgactgtgttctaggatgttctcagtagcggaagtggtggtggtggttgtgttggcctctgtcccgttctcgttgagctgcgtccgcgtcgtggtcttcaccaccatagagctcgtgttcacttgagagttctgcaagttgatgttgagctctccctggtcttgtggcgcggcggtgtggtcgcgcaccgagtccaccgtgatgtccgccgacgccgccgtcacgtcgtgcaccgtctctgatgtctcctccttagcgtctccattagtgaggggcgtttcttcggcgggcccgcgcagcgcggctgcccacggtggaagcggcacgtggcagcgagccaccgtcaccttggtggcggagagcgtgatccgctgcagctcggacgaggagtgcaggtagagcgcctcgccgcgcttcgagaagcacaggctagagatgccgttgatgtcctccttgcgcacggccgcggcgttgagctggcggcgcaggtcggggctcagcaccaggcagtcgccgaggttggtgaggcacagcacgcaccactcgcggtggcgcgccgaggcggggccgcacgagaaccacgagtaggaggtgcgccggaccctggcgccctcgtgcgcggtgagcttgtacttgttgtgcggcttgagcgagggcagcgtgaagatcttgaactgctcctcggaggtgatgagcacgcgcggcgcgcccgcctcgggcagcggcgccgtgccgcgctccatgtcgctagggtcggggtccagcacggtgatgcctatgaccggggctcggtgcttcagctggatctccttggcgagctggcaggtcggcgactcgtctttccgcttgttggtgttgggcacggcgatcgtgaacgcgtacacgccgccgttgttcgtgcctgcccagagggtgggggtggctgtttgcgagttgacgaggaacgtgcgagcgaagtagagacagcgcaccatggagccgaacgcgtcgtcggtggacctcgcctcaatagcgcgctcaactggcttcacgtctgcgtcttccaggggcttgtccagcggcttcttcgggggctgtgtgggcgaggtggggctggcggcggtggtggcgcggcgctgcgagcggcccttgcgcaggcgccggaacgactcgcgtagagacttcttgaacgacttgcgccgcgagatcggcgtgtcgcccgcgccgctgtggtcatgctgcagcgtgcacaagtgcgtcagcgcggtagccctagtcgcatctgtgagcgcgaggccgtgcgcggtgccggcgcacacgagcccccactcccacgccgcggctagtgaggtcacggccgcgggagggacgagctgggtcactgatgttacgtggtagccctgctggaaggagtaggggccgggccgcagcgtcagctggtcgtgccccttccacacgaacccgtcgcggtccgacacgatgttcactgagagagtcttgacctcggcggtgttggcgctggtcttgaggctggccacgatgatctggccggccgcgccgccgatcgtcagcatgcccgtcagggggcacaggatcactctcttgacagcgagcctggggtcgtcgctgtaggggtcgaaggtgccgactcgcttgaacggcggccactcctcctcgtcgttctgttccgtgttctccgctatctcttcaccgctgaaaagctgagcggtggtgtacttgtagagcggcgtcatagccacgccggtgacgtcccagaacctcacagatccgtcctcatgccccgtcagcaacaactggcggcctccttcttcttctggagaggtttcttcgtccactgtgccaccggatatgggccaggccgcgtcggagtataagtttgctgtttgttggtcgccggcagcaataatattgtcagtgaggtgcggggcgacgttgtcgactagctgcgcggtggtgacggcggacgcgtgtatggacaccaggtagggaagtttcacgggacgccaggcagagtcgcgcaggtcgatcactactagctcttcttctgctagcaccaccaagtaagcggcggtctggttgacggtgcttgccaacacggcggcgggcgagtcggggcgctgctcgggggcgggcgcgccgtccggcggcaccggcgtcgtcgtgaagaagtctatcactcgactggtgaagtcgaaggcgacgtgcttgtccccctgctgcacggtcaccgtgtacttgtcagagtacgacgcgcgcggcatgccaccggcataaatagtgatctgatccccgtcaacactggtccggttgagcagcttgctgatggccttgcacgggtagggtccgtacggcgtgactggctctttcagcgctcgctcgcccgcgccgcccgcctcccatgtcacgtaggagccgtcgttgtgcgatgatgtgaagtggtcgccatcatcgttccagcacaagctctcgagctgttgattggacacaaaggtgtgtgtgggcgcggccgccgccctatcccagagcaccacgagcccgcggttgtagccaatcagcaagcgggatgggaccttggggtgttcacagaggctctccaccgcgccagggttcaccttgaagtcttctgggcaattctgcataacaacatcctggtagataacatcctccgagatgctaaacgtgttgaggtccagcgcgtatatgttccctccctcagtacccagcagaagatgctctccagaacattctatgcagacggcgctgatcttcttgttcttgccctcgaaggtgagggtcttgagctcgacgagggacttctcgttgatctcccacagatgcaggctgttgtcatcgcagagggacactaggcggcccgtgccagaaacgaatttgatctgtgtgacggcggagtcggggttggtgtgttgtccgtacagctcgaccccgggccggccgtacaccttgagtgctccagtcgccgtgccgatggcggcgatccgcagcagggggtcccacgccagcgccgacgcgcggttcgggaacccgtgctggactgtcttgcggaaggcaaacaactcattctgcagcttctgcctctcagcggagggctgctgccccttgcctcgtataaacttgagcatccttccagcctgcaacagaacaatcacttagcaccgcacacaaacacacacagacacaaatgcacagtggaccagtaccattatatcatgcttggtaacccgcgagtggacaagccgagccggtgccgctgcggcaactgactgttcgcgcgccgccacccatccatcagccaccagattaaactatcgtcgcctgcaagatacacggcgccccgataacacaatcgataacctgccggatcggaagagcaacgtctgaactccgtcacagcgatagatctcgtatgccgtcttctgc

SEQ ID NO: 1247 - DNA, 1645 bp, Plutella xylostella
ttctaattaaataattatttacaaaacaccttaaagctacgtaaatagtccgagagtattcgaaaaatgtgacaagtttacttaaatctaaaattccacttttaaatctacaaagtctattgagtccacaaagctacaccgcacttagtgtcataaaaccagccagtcctccttgatcatatcggcggctttttccgcgatcatgatgacgggggcgttggggttcccgctgacgatggtgggcattatactggcgtccacgacacgcaggttggccacgccgtgcacgcgcaggcgcgggtccaccaccgccgcctggtcttgcttggggcccatcttgcacgtgcccgtcgggtggtagatcgtgaatgtgaagtgcttcaggcagcactcccagtactcgtcgctgaagaggacgaagtggctgcaccccggcagcggaatgttgtgcggccgcgagccgtatacttggaatgctgacgtgtttgagagcgccatcgctattttgatcccctctgtcaacactttgaggtcctctttgtaagcgaagtagttcggctctatcgacatcgggtggaaagggttccggctcttcagcttcacccaacctgagctcttcggacgcagcagtaaaggcagtatcgtccacgtttctgcattctccaaaggcttgtatactgtgttgtacactcggtctctgatgttcaatatgcgcctgatctgctccccgccgtccgagttcactgaactaggcgcgaagtggaactgtatgtcgggccagttgccggacggcggcgcgtacttcgtgtttacgaatgctagtccttccacgccctgcgtcgtcatcggccctttctcgtacagtatgtagttcgttgccacagctaacgtttggaaacggtccttcttgaacgtgaccggtttgttgacgacgaatgttaaacctccgagccctacgtggtcttgcaagttgtgtccgactttcaagttggctataactgggatcccgtgctctcttaaatgctcagcgggcccgactccgcttagcatcagtaactgtggggagtgcagcgctcctgctgacatgatcacttctcgttttattctcactttgaacctttgcccatttttcatgaactctaccccgtaagcttgcttcttcacagagttgattaatattttggtgacctgagcaccgagtgcaatgtgcaggttctcccgctggcgcacggggcggaggaaggccttggcggtgctgcagcggctgccgcggcgcatcgtggcctgcgtcagcatgaaccctgtctgcttggctccgttgatatcacggttttcgtatcccagttccgctcctcccttcagaaaggtgacagccaggggggtccgccacggcgcctcctgcactgtcagatacccgcccgcggcgtggtacggcgtgttcaccaagtaagggttgcgattgtcctccgacttcaagaagtacggtagcacctgatcgtacgaccagccggggttgccgagcgcctcccagaggtcgtagtcgttcctgttgccgcgcacgtagaccattgcgttgagcacgctgcagccgccgagcaccttgccgcgcggccagttgcagcggtcggcgttcatggcgaggcag

SEQ ID NO: 1248 - DNA, 1335 bp, Plutella xylostella
cccctatcttacaagttatggcgtgtaccacatgaaaccactcagcagatcatcagacatggcgcgtatttctaaagatatgacacagcgccatacctgtaggaaccatgaatgcggtctgtcatcggggtgataagattcgcatggtaaccatggaggcgatcctttgggggcatcgtgcaggggttgttccccaataacctcgggatcttctcagcgtgtatcctgaagttgaccctgttagagttgagagtccctgtcatgactctctggaagctgctggttaggacccaaagttcttgttcgcctttgaggttgttgactactttgactccgctggcgaactggagggtctcctggttgacggcgatggtgtggaagttccgtggagcgaactcagtggcggagttccagcagagaatgctgggggggtccatcaccccgaagtagaggatgccgttgcgatccattgcttctgcagctgattgtgttagccgctcttccggaaatacattcatagcctgcggatcagcattaggattagtaaggaaggaagagttcctcaggatgctggtcctcacgacattctccgtggtggaggcgagcgcgtggaagtacaggtagcgctcgtttcgtctgttcactggagatagagccatgcccaggatgccgtccatcaggtcgaagctctcaccatcaatagtgaacgacccgcggctaggaaaggggaagaacaggcggtgcgtgatcctccaggcgcggtcgccggccacgtccacggccagcaggctgaagccggacacgtcgcccacgtacacgaacgtgtccgcacagtcgctggcgccccgcgagcgcacgtctaccacgggcgtaatatacagcgaggtgtcggtatacaggctggagttgaccttgaaccggtagatgagctggtccgtggcgaggtcaaaggccagcagctgcgggggacagtactgggtgtcgccgatcttgcccgtgtccatcacccacagccggctgcactcgtctatagcaactctaaacacagatgtgagtccgtcgcagttctgcccctggttgttgttccactggtagtcggggtaggccgagacctgcccgcgctcgtccaccgtgccgagcgtcatggggcggccctcgtcgaaccgcgggatcgtgatgaagatgcgagacatttgaccacctggaagttacaggttagaagtttaggtatattttcgatttatattaagtttcattttttttttatgtttactattcgtcgtacaatatgtttctatcacttccaagtgtaaggtgtaggtacttactaggtaa

SEQ ID NO: 1249 - DNA, 2234 bp, Plutella xylostella
atacagtctaacaataaacaagaagttctaagaatataaaatgtcaattagattaacagcatagcattacaatacaattacataagtcagttgaatgaatcaaccatggttatgttcttcttagccttaacagttctgcagctgttgactttagtggcaaacctgagagagttgagtgtctcattgaagcattcatcgaattgattgatgttgaccaacatgagggtcttggagttgccgccgaggctcggcatcagcaggtgagtcagcttagaattcctgtacgggatatgggactggttcgtttgcaacgacaggatgacctttgacaattcggagagcgatctgttaatatgctttgtttcatccattctctgtgtcgtcttcccgctctccgaccccgccaggtccaccaggttcagctgactcataaacttctctttccgctgttcattgattgccgagatcttgatctgagtcaccgagtgtgacctggagcttctctcgttgtttaatgtggcagctgtttgtctgttacgttgagcaaatatcatcaatctgatgaagtcatgagagttcttcacctcctcctctttcaagtttgacacatacacatcagcccccttggagttcaccattttgatatcatggctcacttggtctttgctggaattgagcagatcgtaaataacttcattgtagatctccaagaaagatgccttgatggtgagttcccatcccatccttttcaaatcttcaatgtaagtaaaaatcatgttaaaagcgcgtggaattataccatattgctctgttccagccccaccttccatggtaaatgtttttccagaaccagtttgcccataggcaaaaatgcagacattataaccatccaatgccgactgtatcatgggagacacttcagcaaacacatcctcctgacgtgagtgacgggtgaaaataccatcaaaagtgaatgattgctgcgctttccctttccttgtggagtgtgatgctgaattcagttcaatcttttcaacttcaatagaacattcatccagcacatttaagttgaacagattctttgtagcttctgactccaatggcggtcttattctacagtaaactctgatgttgccttttaggtcttgaacagtattgcgcagttctctttgttctttgtacatgttagcaagaatgttttgtagactttcagcatcagttttgtacttagagatcaactcttgagcatctttatagtccagcttcagtttgtcatgttcaattgatattcttttcaggtgttcagtcaatactctaagagcctctgcttcttcttttagtccagtatggcgccgtgtaaggtcatcaaattccatttgtaatttgtcaaactcagcagattttttcttcaaattgtcagctacttcttgtaatattttagttttacggtggagatcttcaatctcatggtttttaaggtcacagtccagtttaatcttgtcatactctgccgtctggtctctcaagtcattcaggctgttcaacagcttttccttcagcagatccctctcacttgtactactttgtgctttctctttgattttttcataatcatcagatatttcttcatgtttttctttaagatctgtaaattcttctttcattactttatgtttttgtaataaatcattaaatctagctttgtagtcatatggtgggattttcggtgctaccactgatggttttttttcaactttatttagttttggtggattgggtgcagcaggagcagtggcagctctcttgaggcgaggcgcaggggcagttgacgtaacaccatttctcaatggtttagtatggttgagaatcaaatttttcttgtcaacatcactgagtgtgctcactagattccttccaatggaccgggtgttagacagccctggtctgttctctttgctggttgaaactggtaatttagttattcttgacattcttaatttcgaaccaactgtttatgttgaatggtgttggcagctgtatccctgatcgatcagcgacaataaattattaagcattccactgtttaacttaggtctatttccacagctcacaacacttcaaacaatataaaatctcaatgcagcaaattttacttcgggataatattttgtagtttttcgattcaacgacaaacggacattttcaaaattcaaactgatgaaactgacatgacg

SEQ ID NO: 1250 - DNA, 1727 bp, Plutella xylostella
gtacgagttatatcggtctatatctgcaatcttgttatcggttagtgttatgataccataacagtctcccggcgccattagaaaatgtgaaaagtttaactttaaaatggaatttaacaatttgtttatagtcctaacttgtttattgtcagtgaggtacagtttgactcaagtgattcagtttggttcctgtccacaggttgaaactgttacatatttccagttggaaaagttcctaggccggtggtatgagatcgagcggtaccctgcatggtatgagaaggccgggcaatgcgcctacaaagaactgaggcagtgtggtcggcggatctcgatacagcatgtgttcgtgagagacgacatcgagtatgttctccacacgaatagcacttacgaccggggagctgaggcggtgtttgtggtagctgggaataatgttgatcctattggcattccgttcctagtagtggcgacggactactctcatttcgccgtggtgtacggctgcgtagacaatatcgacgaaaaccttaaatatctttccacttggatcctatcaagagagcgcacgctcgacgctggtcgcatgaaggaggcctatgacgtcatcaggtccatacccgggtccagcccagtgtacctgcagactgtggaacaggacgagaggaaatgtggacacatctggacagcgcatgtgcatgcacagaacatgactgcgagcgagtttgaggaaattacacaatttttatagtcgcgaatgtgtatttattttcacacaattatcttcagtgtttatttttaataatttcggcattggactgatttttcaaatgtatctgaactcgtattattggggtattaacatttcacatcgtgtaggtacggtctgttttttgttgttgcagtattgaaataaaatatgtataacattgcttcttaatacttaatcatattttataatttgattagactacctgacctactaacttaattttatgtacataaattgaaattcaaactttgacaacaacagggaatctgaaagtaactggttctgattttacatcttcgtaatatttggggctacaattgcttgtgtcttctttaattaaatcctcctctttaatccccaattgctgaagtggcttgatggcgagttctttagatacaacgttgagactgggctttctcgagagaagccatacgtatatgtagtgtttatcaatgagtgggctgtagctgcaggtgtagactgttgcgtagtagttgtagttagtcgccaacacacggaacggatactgtcttctcatcaatcgtctcggagcatccttgaaggtgaaagtgacgtctaatttagcagcattatccaagctggtgggtatttcaagtgcaccgatgctgtaccggtggaagagaccacggtctaccctcgatatgttcaggtatatgccagagctctgagtctgaagttctagcgtagagcagttactgagatgctgatgatcgctggcgtaatggaaagcttgatgccaagtcccaaagaattctgctagtctgaagtcttgttgaagagtcactccctcaggacactttccaggcgtagtaaaataacaatgacacgatgttgcaagaattataaacaaaaataactgaaacattattaatagttttgatacaataacacaaaattaagtctcgtctgaactgtatcagtatatacagtgata

SEQ ID NO: 1251 - DNA, 1282 bp, Plutella xylostella
tgctggcacattattatcatttcacagaaaatattaaatgctgtcgtactttgaacttcattttcattcactaaacagtaaaaaatgtacacaattcacgttatttcaagttctaaaacgatcgaccgtaccctacctacatttatctacaagagcaggctgagtttacgtgataaaagccggagctttcgactctattttctctctgcatatggggcattgttccttgatgttgtccgcgcagtcctcacacaggcacacgtgcccgcagggcagcaggattatctccttagggttctccgtgcaaaccacgcacagctgcacatcagccagcccgctctcccgcgcctgcgcccgtcgctcgcgccgccccgtcgccagctgcttcttcatggttagttccaggtcccgccgcttgcgtcgcttcaggtacttgtaggcgatccggcctgaggcgaccgctgccaccgcgccgaacacgattaggaggactctgaggaagtccctggagccggcgagtctcttgagcaggctgctcttggtgctggtggtgaggtagagcggcaggtcctcgcgcggcggctggatcttcagcgccccggagttgcttctgctcagctcgcctatggcagtgatgtaggagccatccctcagcatctcttccattgtctgcagaccgcgctggcgcaccccggagaagaacccccacacgtggtcaatgacacccggggacattggctcaaacttgtccgagatcacatccatgtcaagcaggtcagcggccagggcgtccacaacctcgatgctgtacttcccattactgagtacaaacggagccgcattgcacacttcgtgaatagtccgcgtctgatctgaccagaacccagcgagggtgcgggcaatcacatgctccttgatggtgagccgctgcaccacgcctgtcaccgactggttgtagttgctggtgatcggcgcgccgagcggcttcaccaggccgcgtatcacaacatatgggatggtgtagttggaatacttgtttatttctttgtttagtgactcgtctatgtccagtactggtgctgtctgtagagcatttagaatatatttacatttgctcagctgtttaacacaaaaccccaaaataagggaatcaattcccagtatcacagtctctccaactatttccgaaaagaaatccatgatatcgatttcagattcagattatacaatggtttattaaacgaatgatctcattttatcgacaaaaagaataataacgatg

SEQ ID NO: 1252 - DNA, 2702 bp, Plutella xylostella
gtacaacttctttattagataaataaaatctcccgtctcctccagaatacatagcatgaatgaacacagtatacgaatactaatagtaaacattcatagtttatgttttcggccaatctattgatgacatacctaattgaccgaaatacatagtttttaggtctaaattgaaaataataacattaacttaaagtcttaaatgatataatagtccactaaaaagtattgttattgaaatattaacaaaattcggacctttgtgtcgttaatattatgtgtttgacttaaattcttatggttttaagtccattttcctcttaaatctagtaaaaacttgaaaatgtatgcaatttaattcttctaaccgtcatccacagcgtaacaatcgatgttgaaccaccataacagcctgtgacactatcatttcgacaatatctcatacgatctccaaatatctccacatatcgtcgctgtactgctaacagcaattatcattttacagatttcacagatgaaagggcgtgaaacgcaagaagtatctttctgacaagtctctttaagtaaaatttaccttttaagtaaaatttcgagttcggtaattgcttgtcgcagtatagcgatgataccttcttccacatttctcctgccatctcccctctaacccctctctctctatctcctgtcggtcttgccgacgcctcgcttgccggcgaacagatgcttcggcatcttggtgccgatgaagcgatcggcttctcccttgagacccatcttcttggtcttcttcgcgatggccacgtgcgccatgttcttagctcgccgcgccatagtagtatccttaaccccttgctcgtccctggcggggcggctcacagacctcgctcggccgtcgtccatcttggctcgcttgttggcgacgccggaggccgagcgagagcgcgcccgccgcctcgtgaagtgggcgtcctttgtctctgacatgtccacgcccagtttctccatctcatcccgcaacctagtcgtagaccgctcacggccgcgcgcgcgcgtgttgcgcggcatcaccggcttggtggactgcttggtgaggcgcgactcgtccttgagcaccgccttcttgttgcgtatctgcctggcgagctctcgtatctccttcatggtctcgtccaactctatcttgggcacggcgtacatgcccgcctcctcacggagctcttcatccttctccagttctgctagtttctcgaatatctccgggtcgatgtagtccgcgatgttgtgtccctcccagaactcagggatggggtcgtgccgctcctcctccgcgatttcggtgtagttcttttggaggtcaagcacataatcgtctccctgctccaactcaatatgtctctcgaccctctcccttctcttgacgccgggcggcggagcggtgggcgggcgggcgcggctgtccctgggcgtgggcatggagacgtgcaggcggttgaggatgccgtccaccttcttagtccgcatcttctccgtgactcggtggcccagcaggcgctcgcaggcctctatcttcacctcctgcactccctcttcagtcaccgtggacatgcgcatcactggcacgttgactagttccgagttcgagtccgcattgacaacattcccagtccggcacttctcctctagttgctccagcagtatcctcttctcttcaggcaggtcttcaggcttcaccacgtccatcttgttgagcaccagcagcagcggcttgttggcgaagaggggcttgatgctctcgaatagggatatctgctcctgcagcgtgtgtccgcacagctcgctggggtccagcacgtacagcacggcagctcgcaggtgggccagcgccgtcaccgcctgcatctcgatcacgttgcgctcctctagaggatgatcgagaatgccgggcgtgtctatcacctgccagcgcaggtacttgtagtcggtgtgtcccacgtacagactcttggtggtgaacgcgtagggctgcacttcgacatcggcgcgggttatcttgttgatgaagctgctcttgccgacgttggggaagccgcagatgatgagcgtgcgcgtgtacgggtcgatggaggggagacgggctaagtgctggcggacctgttccagataggctaagttagcagcctgtctcttcatgatggtggccatgcgtcccagcgcggctcgcttcagctgcttgcagcggtacagcgagtccccatacttgagaagacggacgtagtctttggagacattgtcaataagatggcgcgcggtgttgagctggccaagcccgagcttgtagtggtccttgtcgtaaagcacgttcatcaggtccgcgtagaacgggtgcacatcgtccagctttgggaactcctgaataatgcgggagagacggtcgtggaagttctgttgtgtgaatttaacttttctgatgtaaaaccctcgtatcctggagattttgtaatgcttgtggaccacagtcggagtcttccgctgggtcttcgatagcataatatctataaagtccttggctgtggggaccaccgctatctttttgaagttgtacaaactcattttggtttatgttgttattgtttttacgtaaaataaagaactcgacatgagttcataccacacgtaaacacacgtgcggtttaaaagaactgtca

SEQ ID NO: 1253 - DNA, 715 bp, Plutella xylostella
ttgtcagtgattagcggaaggtacgtctgtggcttttgaccttgagatggcacgattacgtactgaggtacatcgaattgctttggtgagcctggtgccagaccaaactgcgagttcggtgacccgagttgggggaagcgggggagggcaggcagggcgggagcttgcggggcctggtagggcttcagcgcctgtgatggctcgcacactgttccttgcagtagcacactcagaggtgcggtgtatattctgaagttgatgtcactgtagtcgaggtttgcttccaagaacaccggcattctgtccgacagaacccacacgttctcatcatcatcaattttgacatcactggggaagaccaagccaacgtcatccttgtcaactacagcagtgttttccggtttcaggggtttgtttatattccagcagccaattccgttctggtcgattaagctgtatagttggactccgttctctccgacgaccttggcagtggtgtgagtgtcagggccgcggttgccaactactctgaagtctttgtagtttcctttggtcttggtttcgtttctcaagacgctggtggagacggcgaactccgtgtggctggtgagcggactgaagtagagagtgcggaagccatcgctgcctgctggcgacgcggagattccgaatatgccctccactccccagtcgaaggtcagaccggcgatgttga

SEQ ID NO: 1254 - DNA, 1683 bp, Plutella xylostella
cttagttattataaaaacaatatttcatacaaataaaagcatcttaaacataacaagtacactatacaacattaaattaaagcttcatttctatgatggtttcacagccccgcaccattagggcggcaagtttgatgttctgtgtgttgagcggacagttgtccagcttctctagaactctctggagcacgctgatggtggaggccggggaggcgtgcgccggcactgacggatccagctcatagttattgagatgcacgacgagatgcggcggcatggctgcgagccactcggcggggtcggcggccagctccaggtggcgcttcaagcgctgcgcggtgatcgccagcagcggctgcagcgctagatcaagcgctttgacctggcccaccagctcttccgccagctggtcgtagcccaggtggtaggtgcccactagctgttgccgtttaacgaagtcgtcatcaatgtgccagagatgcgcgaggtcgtgcaccttgtccatccactgcaggctctccatggtgtcgtagcgcggactgggccccgcatcctggcaggagaccagttcaagcgccgcgcggatcaacttgttcaggtacttcatgcggggactcttcaacttgtccgacggcttcatgttcaactcccgacgctcgcccttccccgctatggcctcgaatatgtagtgatagtcgatgtcgtacaggttattcagaggcttggtgaccttcagcttgaagtggcacatgtagtagatagtgcaggccacctggtagttgaggctcacgatgtcagcgtcggcgcggtgcgtgttctgggccacttcgaccagcgacgggttgttgtcctcccagatcttttcatactgcacccggcgtttctccttgtccagtgtcacggacgaccatttcagaaaatgctccagatatgtcgtcgccacttcgaggaacttcaccatgttgtcgtctgatagagccacgtcctgcacgcacagtctctctttaggcagcttccccactttattgactaaccggcaactgctttcaaacacatccttgacgtaggtggtccatatgatggagcagagtcctagttgtagatgttggtcggagatgtgtgtgaggcagtcgaggacggcggccagcttgccggcgtcctgcgtgctgcgctgccacgcgatggcgtactcccagctcatgttggccacgatgtagtcgggcgacgtgctgaacggaaactgctgtctcagaagagacacccatttgaatatcgtaggattatcgtcgacaagctgtcgatggtcctccaggaacatggcgctgcggtcgtcagcatcatcctgggtggcctccgggtccacggcgcggtccatcagctcgttggccacgacggccgccggcgggacgcccagcgagcacagccacttggagatgagctcggtgacagagccctgcccgcgcgagtacacgtacttcaagttcacgtcgaagtccacgccgtccagcttcggtaaggttttgccgttgaacgttattttgagcatcagcacgatgctgagtatcgatatgtcctctagtttgccgatgaggaggccccattgtgcggcctccgcggtgagcgactcccagtcggcggcggcggcgggctcgagcgcgcgcgcggccgccttgcaggccagcg

SEQ ID NO: 1255 - DNA, 2481 bp, Plutella xylostella
atttgccacaacaaatccggtgagattaacccgaccaagatccaaagtcttgtggaagcgtacgtgaagaagatacgcaagaaacacaagctggggctagcgtagcagacggacgccgacaccaggctacacgatgaatcgagcgaataaatcgagtaatcgaaactattcgcgcgctggcaacactgcatgaaagctcaaacagaaatcccgtgcctttaaaaaaatactctcggttaaaatgagcggcaataatatatttgtaaagactgtcaattaatgcgcgtgcgctgtttttttgacgttttaatgtatttttatttttgcatcaacagttgaatgaagttataataagaattcatgcaggaatgtccagcatcgtggaggctctcagtcggcgctctatagtgaaagatgtctatcaaatctagtatattgtaattatgaataatatgtaattttaactgacaatgtattttacttaagtgttttatttaaataaataactatagaacgagctgcgattttatgtgtggtgtaggaactagatcatgtctgtagataacaaattaaattttaaatatagctttttgcaaatatgtttaaatttaatatgtcttttatgttcggccctgagttatgaacccatatttaatagagaaacacatatcgaaaatttatttatctttattgaatcacaaaaaagactattcaaaagttacaagctgtcatggcatacatggctagtttttggtatggtacacaaagtggggattataaatatctaaactaaaagattgccgacaaagctggaggaacttcatttactgtctaattttacaaattcacatctcaaaatacaaaaatatacacatataaggccattgatgtaatcatatcagttcctaccattttatcactacctattttagaatacactttttttttcgtaaaaacttgttattatttttcgaattttattgcttacatgacgactgggtttactaatagtaggcatgtagataaatctccatattggtaatctcgattttcatcacataatttataatctttttctgaacattttacacgcacgtgatttcttggcgaaatttctttcctagttttctctgattttcgctccggtagtaaaccattaaacacttggcatattcactgcattttcatgatcatacgtgcttatgcatatttcatcgcagcaataaacacagtatattatgccaagtgtataaaataaaaataaaacacttagaaatctacacagcgtcagcaaagccgacttgcttggctcccatgtcgaattccgtgtagaacttgccgatgaacacatcaccaaggatccacagggggccgtgcgggggtgggatgtccagacccatgaagccagacagacagatcgtcttgccgaactgagataccttcaacacgtaatctttcccctccaacgtgaagtcagtgttaccaatcgtgaaggtaatcttcggcagggttggcaccagcgagcaatccactgcatactggccggccatgacgggcgtggcgccgatggcctcgttgatgccttgaacctccttggtggggccagcgatgagcgaggtgcccgtgtcggcgatcgcttggcaaccgtcactacagaagcccttcccgttgaccttgatcccgtcggccttgaactgccagtaggtggcggaggtgagcggcacgcgcgtgaactggccgcggtagtgcgccgggtccgagccgcccaggatcaactcgccgccttgagctgccgacgggtctctgttcaaatagaagctgaagaccttgtccttaaccagcccttgagccaccatgttgtcaaacacgggggtgactccgtccacggcgatagagctgaatgccatgcccaggattccgtcaaacttggcggccacgaaggcgagccctggctcggagagggcttcggcgaatgtctggtcgctcactgttattccgccaagcgtgacctggtcggtggacaggaacccggagaggctgccggagccgtactggatggcgaagtccgagccgttctggcggtaggtagatgaacggctgctgtcgtatttgttgtggagcatgcaagcaatgttggtgaagtgacacttcttggagggcacccacaggttggaggagccggtgtcgaacaccaccttgaacgtctgcggcggcgtgccgatcgtgatcggaccgtagtattgtgcatcaaggtagttggagagtggttcgggcgtgggtccagagacggagtagcgaaggtgcagctggtgcagctccgtgccgacctccctcagcgcatgacgaaccgtctgcatgcggtataggggcaccctaacgaacccggccgcgcaggtcacggccagcgccaggaaaagcggcaataaacccgacatcatcatagtttctgcaagtcacctgtcgctgaagcgacgtttctct

SEQ ID NO: 1256 - DNA, 571 bp, Plutella xylostella
ccacgttaaggtctaaacttccttttgaaatgtttttttgccaaaactgccacgccgtattcaagctaattccaatttttagaaccgtatctcccaatacccagaacctagaatatggaaactaatccgccagaaactgcattttttaacttactctagctattgggtattggaacacggtcgtaacgccactatacaattgaacaacatctaagtgtgcacttcaggggtgataaccagagtggtcctaactcggccccgcagtatctctaacttcaaactacccgcagttttctctagtactgcatatatatcggtggcggagcgcgccggctgaccgttgatggtgatcacgatgtcacccggctgaagaccgccattgtaagccggcgagccaacgatgactttccacaccaggatgccgtgttgaatgtctgtgggcaactctgggttcctcatccgcagctccatgaggatggtgggcgtcagcgacagcatggtgatgccgaggtagcgcttcgacacttctggtggcttcgtcttacctgggaaacgtatgaataaggctgcg

SEQ ID NO: 1257 - DNA, 2689 bp, Plutella xylostella
cttaaatttcacataattattatcatcagggcacttgttacttaatatacttataaaattacaggtattacctaacttaacctagttggtgtaacaaaaatatattaggagtaaaaaaatcatgatccacaactaagacactcgtctttgttttgcagagaacatgtgatagcagccatgttagcatcgtatttatcagattttccatttgctatgcttgacttcgccttcgccttgtcaacagtgaattgtattgcatttacagcaggcttagtacgtaaataatacatgccagtcttcaagcccattttccatgcatagaaatgaattgatgtcaattttccatagtttggttctgctacatggatgttaaatgattgactctggtcaatgaaagcaccacgatccgcggccatttggattgtggtcttcacagatatctcccacacagtcttgtaaagatctcttatttctttgggaatactttcaatagattgaatggatccattgttgtgtataatgagatttttcatatcatcatcccataaatcagcctcggtgagatcgcgaagcaggtgatggttgaccacctggaattctccagaaagaactcttctttggtaaatgtttgaagtgaatggttcaaatgattcattgttgccaagaatctgtgcagtggaggcggtgggcatgggggccagcaacagagagttccgcaggccatgtttcgcgatcttctgcttcagagcactccagtcccacaggtctgtgggtgtctttccccacatttcatattgcaatattccttcactggccggacaaccagcgtacgtttcataaacgccgagtttttcagctagttcacagctagcttctaaagccccataatagatggtttcaaatatttgttgattaagcttctgggctccctcactctcgtaaggaaggcgcatcaatacaaaagcatcggccagaccttggacgccgatgccgataggtcggtgcctcatgttggactttttcgcttcggggacaggatagtaattaacatcaataatcttgttcaggttctcagttatgatttttgtcacttgttttagtttctcaaaatcgtatgttttattttcggttacaaacatgttgacagcaattgaagccaagttgcaaacagctacttcatcagcagatgtgtattcaactatctctgtgcatagattgctgcatttgatggttcccaaattcttttgattgctctttctgttgcatgcatctttgtaaagcatgtatggagttccagtctctacttgtgcttcaataatagccttccataagatttgagcgcggacttttttaacaaacctaccttcttgttcatatttctgatataatgcatcaaattcatctccccaacaatcagccaagccagggctgtcgtgagggcacatgaggctccactcctcgttgttctcaaccctcttcatgaatagatctgagatccacagagcatagaacagctctcgcgcgcgcacttcctctttgccagtgttcttcttcaagtctaggaactcgaatatgtctgcgtgccacggctcgaggtagacggcgaaggcgccggggcgcttgttgccgccctggtccacgtagcgcgccgtgttgttgtacacgcgcagcatgggcaccagcccgttggagacgccgttcgtgcccgcgatgtaggtgcctttcgctctgatgcaatgaacatgaactcctatgccgcccgcggatttggatattaatgcacactgcttcagagtgtcgtagataccttcgatgctgtcgtccttcatggcgatgaggaaacatgaggagagctgagggcggggggtggcggccgagaacagggtggggctggcgtgcgtgaagtacttctcggagagcaggttgtaggtggtgatggcggcgtcgatgtcggcgccgtggatgccgatcgacacccgcatcagcatgtgctgcggccgctccgctaccttattgttaatcttcagtaaataagatcgctccaaggttttaaacccaaagtagttgtacttgaaatctctgtcgtaaacaatggcagaatccagcctttctttgtttttcatcacaatatcatagtggaaatcagaaatcatgggtgatctttccttagtatgaatgttggttatgttgtacaaatcatggatgacatctgagaaatgctttttggtctctttgtgcaagttggagatggctagtcgagcagcgaggacagcataatcgggatggtcagtggtcatagtggccgccgtctccgccgctaggttatccagctccacagttgtcaccccggagtagataccgctgatcactttcagagttatagatacaggatcaacaaagtccatgttcaagccatagcatagcttcttgattctagaagtaatcttgtcaatatggacttcctccatcctcccccctctcttcaacacgtacaacttgttattcttcccaaccatgatgtctgcgaattgccgattttactgccaagttttaaacgcccctaatttaacggaactctgactattcactgagcacaatacaataaatttccagttactaggatatgagaataattgggacaaaagaaataaaatgtaaggtaaaccggtaaccgcctcggcttataaat

SEQ ID NO: 1258 - DNA, 6308 bp, Plutella xylostella
tggatattttatagtacaaacttagtgtcactgtcagtattatattatgctaaaaatcataagaatcacttgaattttatttaaaaatcattcaggcttattaatgaagagagcaaaaatatacaacatactaaatctaaaattttaaacaccacggacactaaaatatggccacttgagacagtaaatccataaaaatgttagaacatacattaaaatttattatgtcactagagagatttgttctcgttattaacttagcagtgtccttacattacacaaatatttacttttaatgagaaaaaatatctgtcaaacattcttactaggtttatcaaactgatattttacagtcttttttacagatcattaaagttcttgagtatttccataataaattaaagcttcttattaaaaatatttacggtatcgcttaaataaattacgtaaatgcaattaagtcgtaacttattttgtcatatagtcagcatatagaagtagggtccccttccatagtgcacgctacattatctagtttatgggctaagtgcattttgttacatagtgggtccatctctagtcctaatataatttgttctctgtatttactgacgtagatgtacagttctttcaaggcggagagtgtgtcgaactcgttgagctgctgcacggagagctgctgcatggaggtgctgagctcctggtccgtgacctgcggcagctgcgacacgcccgcgtagaactggatcaccatgtcgcggtacgtgggcaggtccttggcaaacagcagcttgttcgacggcgagtctttgcacagacgatgctcggacagcgagcacgcgtccatgaacgtttgcgcgatcaccgacaacgacgaatctaccgtcgatgttttgtttatatcgaatataaaatcgggatttttaatgaggttcacccaaaaccgtagcggtaagctgttggacttccacgcgtgaaccacctcagggttcatgatgccgtggctcctggcggcttcgtcgaagaggtcgaacagccacttgacggccggcggcagcacctcgttcactgtgagtatcgtgctgaagaaatcatctacaaacttgtgcacggtgcctttagtggacagaagtctcgtgagaaatatttctggaatagctttatggctgtgttccgatgacttgttgataatgtgctgatattcaatcggcctcactaagtggtaaaagtgcacattctgatctgtacctatatcactgttgtaaactcttatgtgtgaattggaacaatatattcctgtgcagtttttacaaggtattttgtagggagtgttgaaactgtcgttttgacgagatatcaaagacatgactgcggactctttcactccataatgagccagagtgttgagtttcctccagccattcagagttttagtggtaacgtcttcatcttgaagtgtgacatggccgcctcgcccatgtctccattccaagtcaacttcatggacggaaggcctcatagagaatggagtatttttgaacagggcgtccaaaattttaccttttacctgcgatatactatcgcaatctaatactctggtttgaactttttcgtcaaaatcgtcttgaactacgtgtaaagtaacagtttgataatcaatttgttcttttagtagtttctcttctgacaaggaatacctggcttcatgagttatagcatctacgacacctttctcaatttggtgtttgattgctttgaataataaaaatagtgacgacccagcgtagtcttttaaataatagtacatgcacagagccatccagttagttagcattttctcgacgacactttcggtccttctcaacataagttgtggatgtttgttgcagactgatttatcaataagacgcaatagaagcgattttagaatgtccgttgcatattccatttttcccatcaatattatcatgagcagagatgctacattgactttatcccgaatattgaatgatttttgtgcttctaaagtatctataaatgacagaaggaaacatttattgttcaatagttgttcaaattgaatcatagcagcgtcatagttggtccgaggcgtgtttatgaactgtcgctgcacgttcagtatcggatggtcggacacgcccgggaagaataccttcatgacgtagttgacgtggtcgagcgtcggtatcccagaatgttccaggtcagctgccaagtctgacatatcagtctgcagttctgcaaacgcaagtttgcattctaaacgcacattactctccagtgtatccatttgaatctgtattctcttgtattccctttcagccttggtacttcgtcgtctgtacattactagaactagcataaatattaggaccaaaaagaaagtaccagccgcaatgcctgctatagcttctggtgggaagttataatttctaagcagttcatagtgaagatatccaatagggtacctcagatttcttcctatttttacgacaactaatggaaggttaacgtctgtaatctccattccattttcatctgtgtttgggggttgagtttggggtggtgtacaaagcaactgttgcattgtaagactggtgacattgcacgtttgaacgccgattgtgaccattacatcagtctcgtcactagctcgtattaaatgctccccttcaataactaaaggatcacctgtatatgacttgattctgtttgggaactggtatacataaggatcttcaacaaacaccatgtgtgtacgaggggggttgaagtacttttctaaatcatgcattgtttcgacgttgtccataacgaatccaactttcattgctatttgtggagtactagtctgagctttggtagcttgtaatatttcatggtactttttgttaatagctggactgggacattccatctgatttgagtttagaacaacgcaagcagtgtggttaactgggatatcttcattaccatagtataatttcatcaatggcttttggatcgtgtgtaaattggttccgtgtacagttatcattcgtccaccagatacaaagcttttgaggggcttaatttccatgatagtagggtcagctgtataattgaataaatccccatttagtgtgcggttagcattatctatgacgactgtaactgtatgaactacgtgcggaatgatggctttaggagtgatacaaatcaatctactgttagcagtctgtgttttgttgactgcacatggcaattcatctaaatacgccgacacggccgagcctatatttaagtgctgtccaccgatcgcgagttgagttccaccggaaactgggccgacggaaggataaatgctttgtagttttatgtccttgtaactaaagaggactgatgattctgtataacccgcatcgttttccactataactggagccacggattcattagatgccccagtgcggcatgttatgctgacagaaacttcgaagtcaacaatatcacatggtacttcaccgatccgtacttttcctgttacctcttctacccttaacccaaggttgctgccttcaatcgtaactaacgttcccccttctattggcccacttaatggctttatcatatctattcgtggcttaggacattctgttactggattttctagacatgaggatgagtatgcgcaagtgtttccacaccaggtacattcataaatagaattcctggttatacagagtgagcagtcagcatgttctctatgagatccaagtatttcacacttgtacagtgtaatggtgattgtatcaatgtagtgtttatggttccagaccaccttcacacttacattatactctccaacatcttcttcataggagtaggtggtttgatcacaaactatgaagtgattagattctactctagctggcagtatcatattagctaattctatgctgacaatacattgaaaacctgtgtggccgggttgtaagtgaggcaagttctctacttccagctgaagctctttaggaacattattgggcaataatattggctttttatattgcctaattctaggacagtgaccaataccatgattgagaagttttgtaggattattttctccacttataatagttctttgacatacagaggcatcatgtgtacagcgattatcataaatacaccaattacaagcccagtcactcattatacaggtatgacaagttgtgtgtttagagcagtcataaaatgcaaagttgcgggatacaaaatctttgttagtctctgatgaatgtacagacagtgggacattgacatggtcttgcccaggtgggatggcaggtctatttttgatgtcaggagtttgacaagctaagccactagaggtgactgctgcatctattgctgtagtattgccaaatacacatttgtatttagcaccaaaaggcaattcaggtaaagttctaattatgagttgcacagttgtttcttcattagttgcaattctgtcaggtagaatttgctcaaaatcaatacactgttggccggtgtactgtgacagccacctcggtgcactttgagtgcccttctgacacatattttgaacagtgcaccttttctccagagagcaccatccacagtgtgggtcattggactccaggcaggaggagcagtttccatgctctgaacaatgctcagttggtatttgcactatggtatttcttcccaagacatacagagttttttgatatggtgatagtgtagtatcaggcagtattttttgacctggaagtatttcttcactcgcatattctattgctttgtctgcatcaatcagaacttttttaagatgcccatcatttgtacccataaatgctactgtatgcaaacctgttacagacattgtgacagaagtgatcaatgtgttgttccagttaattacagacatggttttaattggatacagcccactaattttaaggcctacctcacaaaagttaagtatgttacctgtggaccctacactggggcacttgccatctgagatcatgcctgatatgtagcccatgttacgagacttagtacttccattgaaacacatatgaacattttcattaaacttaatttccatttcttgcaaagaaaacacacatatagcagacttggccataggctcattagtaatactttttgaaggactaaaagtagctacaaatactgaatctcctacctcaatgcctaactggttggccaggttggcacctgccttagctattttagcatcttgaactaaattgtaattgacaatctcactcttaccattaacagtttcgcggacatggcactctagcgtgacttctgtgtagctgttgtagttgtcgtcgttgacgcaggtgcgggccagccgcgtcacgtagccgagctcctcgttccccgccaggtgcgagtgcttctgtatcagcaagaagtatgcatagtcactggcgttgaatccatacacatattgcactaagaagttgtccctgtacttgacatcaatctgtatgatgctctgcttgttgaaggtctcctgcgcgagctccagcgacatgaggtcgcggctggagatggcgggcacgtagtggcggtactcgccgttgttggtgaaggtggtgcccacgtacagcacgttggagcggtcccacgagttgtaccgctcgggcccgatgaaggcgatggtggaggcctccgcgtcgttggcggccacgctcacgggcacgaactcgggctccgcggccaggtcgcccagcttgtacttcacgcacgagccctgcgccaccgacccgcacgcgatcacgatgcgggactcctggtcgatcaccaggatcttgttcacgttgtcgatccacgacgttatgctgggagaggaacatcccgtggcagggcacataggattatcgagtttcggaccagtccgtaccacatgaataggcttcaagtcggggctcagctggtgaaggaagttcaaggaacccgcgtacacttgtccacttactctgtcgatagcgaggtgatagaagtaaaatgtctcattattatgttgactgtggtattgtgatatgaaatcgtacccgaacactgttgtacattttagccaaattattaaaactatctgtgtgaaaatggccatgatcacatgttatatcactggcttatcatatatatccactttttcacaacgggaacgatgtttttgtataaatttcaacccatttttatgttacaaaaataatgtaaaaagcatccatcgatgccgatga

SEQ ID NO: 1259 - DNA, 3563 bp, Plutella xylostella
tctatatcactcgtcgttaactcctatattttattttacaatgttgttatacaacaaaattattaacatttaatagttacttattatatttataccacattcgcgttaaaattgtgcatctgtaaattacatttaaagtgttcaatcaatagtattgagcaaaactaatattgcttgaaaataaataaaaattgcttttagaaaattcacaataactttgaccctgcaagggacaccaagatatgttttggccgatttcttgaagaagctcgctcatgttatattttgaatactggacaaaaatatagatatcatctaattacgtctcatagttagtttttaaattatagatttcttttgaaactggaaggtatatttatctgcttataatattgataaaagagcagtaaggatataattatagtaaaaatataactgtgtaaactttgtctgcagtgcatataaaatagtttacttagcttacgatatttagaagatttctactaattaatgtatctatttatatgcaggtaagcagcttaaaatacaatatggcctaaagtacataacctatgttttacgcaaatcgtttatttattaagaaaaataatctcaatgtaaactataaaaatgtatgagatacgacaatacctgttaatagttctagattttaacaacacatattcttattttccttgtttttgaaacaggaagaatatatttagtactcttaaattgttcaataatcatattattgaatgcctgatatcaaaccatgtgataggccgagattgtagcgaaacaaactgcaaaagcgtaataaaaaccgataaaaactttcctacgtgatttggtacataaaaaaaatgctaaaaatggcagtttcttacaaaggcaatgattcataaatttttaaaaatcctcaaaagtctcgtatttttatacccctccgaatatgagaaagaattacttaacaaaaagtaaatagataaaaatataacttataaaagcttacaaaactgcactggaaatgttgataacatagcatttacacttaaaaacatacataactgcaataaaaataatcgagtgtctttttcttttttccccaatcactacgagaaaaaaacttaaagatcgcataatcgtataaattttcgttccgaaaaacaactggcgaaaccggcagcaccgacgcggccaatcagagtattgctcaatcaacatttttaccacgccaaccaatcacaagagagcttgcggccacaccacaagtgctgccctctattctttcttccagaatgataccttaggagggtgttataaagacctattgtggcggtgcgggcttggcgatggagaagcgaggcagggagatgccgaacttggtctccagtccagtgaggaccgggatggccacctggtagccgccgatgtggtgcggcttcttcactacttcctcgatggggctcgacacgtggagttctgagcccgttggccgcgatcctccgaagtcgacgtagaacagtcgctgcaggatctcgtacgtgacgagcgtcactccgaactgtggcgacgagcggaacactcgcgcgacggctcccttccagaaggctcgcgcgccctcctcggcgtagatcttgcgcgccgcgtcccacacgccgttgtacgtcgtctgacctgatcgcgccaccacctgtagcctagtcttgatgacgtcggcgggggtgacgagcgaggcagccgggatgcccgctatagctccggcagcgagcagcgtcagcgggtggttgtagccattctcgtcagcaaacttagtcttaacatgagcataagcggggaagtagatagcgctgaagggtacatccctcagcagacaggccttagcccccttgtacagtccgaacaagcctagctccttgaccaccgacagtgcactgactttgctcccgcccgcgatctctcccgccacttgtagacggatctttactatctctagcgggttcgtgaacactacttgagaacctcctgcacaaccaccggccagtacttcggcccagatgctgatgttgcccttcttgtccataaacttatcacgcaccagatcatttactgtaagtttgatggctttttcaggagctacaccaatgagctgtgggatgagtcctcggtacaaaccgaaaacgccctcgtgtctaataactttcttgaagcaatcaaatgagtttctgtaggcgacttctccgatgaaggatccagttctttgattctgcatccgagtcttcaccaagtcaatggggtacaccgcggaagcacccacagcaccaccgatggcaccaagagtgaatctgtaagtgctctccaatatctgtatcaacacaccacggtcttcggggctcgaaacggcttttatttcggcgactcgcctcgtcacttgcttgaagtactgttccggggttatcgtgttcaggtcattgtatactatgcgtccattagtattatgtatcgcgtcgcacagcatgtacagtatatcgacttccagcggcgtgatctggctcatcatttgggcggagtggaggaactcttccttcgttacctcctgcgttctgtggccgttggttgcgttcaagtagacacgttttatcaactccatgttgtttaggagagacgtgaacgccatgtagtaggggaaactgatcttgcgggtgccttgagggaagtttgacgtatcaataactttggctttcatctccttggtcagcagatggctcttgatgctcagcatgatctctttaaagtcagcggccgagatgaaccccgagccatccttgtcgcacttcttaaaggcctccactccatattcctcgtggaagtcatgcaggaactggctgaactcggagtaggtcaccagccgcttcttgtccttgccgaagtagaggcgcacgaatgtgctctccatgttgaagggaagcttcttgttgaggaccgtcttgttcatgacctcggcgaattcgtcaaaagccaccagcccattcccgttggtgtcgaagagctggaaggcagtcttgtacagcgcgtccgggacacacagcagtccctcgaacgcctggaactccgggaacgaaatgagcccgttcttgtccatgtccacgatgcctgcaatgagctccaccgactgcttgttgtagtcatcttcatcaaataggccgaggaatttccgaacaaaatcttcactggtgatgaacttttcgccatttttgtcaacagttgcaaacttcaggaagatttcatggagtcgatctgtgtcggcccgctttaagtaaccagccccctcttgacaatgagcttgactaataacagagttcaacaaggaattaaacattacagtgttttttgtcacttcagagctttttcaactacaaaaaaaatactgtaatgtttagctcggtgagtgtgtgtagttttgtttgctcggtaacgtcacactttataaaaataatcgaatatctatttttattttcttcacgccagattctcgtgatcttcaacaccgggcaatttat

SEQ ID NO: 1260 - DNA, 1015 bp, Plutella xylostella
tccgcttctctgccttgtaggcgttggcaaggggtacgttatcgcggtccgcgtacgcgtcatacaaatactcggcttcgaccagcggtcctgggtacgggtctagactgcggtaaaggcgagccagtttctgggagaccaacattatcggcacgaagaggagaatgcaccatgcgagcgacatccagtagccgttgatgggcatgagcacgtgcgtgcaggcggcgtcgcgggtcgagttgtaggcctgcgccagcggcccgcagcggcccacgtcgctgccggccgcgcgcaccacgcgctcgaggtacgcgcgcatcggcgccgcgatcgagtcgccgaagtcgcgggttagattctgtatgagctgcgggccctgcgtgttgaggaacagctcggcctgctcggtctcggccatcaggtgcgcgaccgcttctgccagcgacgagtggttgaagcggaggccgtcgcggagggctgttgctgtctcatgcagcttgctagtatcagcagtaatcggcacaactatatcatcatggtaggtccgcagcatggcggccgcgtcgcgcagttctatggtgagctgagtgaacgcaggtctagacatcagctcgccggcagccgcctcgagttgggcggagagagagtccagggacagggaggtgatgttcgtttccagcgcctcaagaatcctgtcaaagttgaactcgctcaacccggtagccgccagttgtttcagcttctccttggctgaaggcttcagtatgacgacgttgcgcgcctgcgtcgggtacgcgggctgtagggccgccacctgccgcgtgatttgtagttctaggtccgacttgatggcttccaggtcgatgattcggtggaagtggagcgtcgtgtaaatagtctggttgtcctggcagcggtataacacagctgacaggttgaagtcggggtcgcggtgttctttgaacagcgcctgctccaggtccaagaatctatccacgtcttcgaacagacggtt

SEQ ID NO: 1261 - DNA, 4157 bp, Plutella xylostella
atcaagtaggtatagatagaggtagagacaaataaaaaaggaggatgaaattcgaaaatttaataaaactaaaattcagttccactttagtgtagacttacttaggacatactatctaccgataaggacgaccagacacaaaccacatccaatagtttatttataatttaaattatatagcttttctaaaatatttcatcacaatagaatgtgtaaaatacatgaacaccacataaacgataacacaaaatgatattatactgtgccaggtttaggttataaatatttttcaatgttaataaatatacttttcagcatctcaaaaggctaaaatacattttataacgtgaaattttcatcaaaaaggatatctacggtgtggcgcaaaaacagattaaaaagagattacaaaatggcgcctttgagggtgcaagacagaatcacaactaacaaagtcgcctgattggatcccattttaatgtgcgcaagatataatttatgactactatggtaacaaacacgacacgaaatacaatttgtacatagcgcggctgaaataccgctaacagttgctaccaaacggtaaatagaccccatatacttgctccacatacaacaatatactatagcacatacgcggataaattttacagtcacctctcacttacactcgcggctaatttatctctatgttacgattgcaagtgacaggtacaaacagtatcacgcaaatcagaggcccttatgggttatatgacctcgttctatgagccatgttgcatgtagaacaaatatctaggtgctatagctaccacaccgcattgccaagtctggatggaggaaatccgcatagtgttgtatatataggatggagaatgaccattactttctaccttttctggttgtggcaatctctttctgaaatccgaaggtgtaaattcgcaagggacgacttgaggttacaacagacgacgcaacgtcactagtggcctctatgtatctctacggaattaatttatcagttagcgacatgtcgctaaacaatacgtccatagaaatatgcagcaaccaggggtgacgagacatcgactgacttaagtcttctgtcgtacaaattttaattatggaacacagagttagttagattaatgactccaaaagcccttttccgtcattttaatacaaaactatgcgtgatttctttcgtccagctcccatcccgacactggactgtgatcaataatatatttattataaaattagcaacaacaactgcatcacaagtggaagggaatctacattaaggttacattttatttttaatattgaattaatttgtacagtgatagtttataacataatgcacaacaaatgtgactagatacttaagattcacattgtgctcgaaggggtgaacctataccctagtgccaaacctcagattctcgtagaaatataaagcttattttgataaagtcctctaatgttatacacacacaactatcattagcgagattagaatctataatatgaagttaaattatatctttatacataataagaaagtatgtattagataaaagtatataggtattattaatagtaagaatgtgttaaagggtagttgcagactgaaattggcttatttgtctttatgattgcttaagatctagaatagtcttgatcaaatcatatttttaaactcaattttcagttataaatcagttagcaaacacacattgtaacattccaaataatagtttaaaaaataaacaatcgaattaaatataaaaaaatacatttcatagtcttttgtacagtgattcggtgtagataatgtaaaaattaaaacgattgttcactgcatataagtattgtgaaactcttgactcgacttcagaaaaatcaaacacatggttggtacacatcatagtttcaattgaaagcttctagtacctgtaaaatttcgatcaagtctgaaatcgatgataagtactttaaaaaaaactagtggcagacctgcaatccattggggctcgttcaaattggcagtactatttttaaaatcaagtccttggtatattgatatctgttttcataatttacgataaaattttaaatataggaaactatagacattattccgatataagttcaacaaaatgattacgtctaaatgtttgttctaaaactgtaccatctagttgactgtacatcggatgtccggacctccaataaaattataattgagatcaaaatttatagttcagtagagatgcaaacattttgtagagtgtattaataattttgtttcgtaaaatctgtacttacttaaattactcttactaagtttaattactcccgacgaaggacgaagataaaagaagctaactagatgagctaacatacagttacatacaatattatacaattcggataaggcgataacgataagatcagtatagtataagtaatgtaagtcggtaaatcgaatctaaatagtgtgggtccaagggcgatgccttgtggcactccttacaagaaaacttctgaattttataacatcctcttttgtaatataattagcaaaaacgactatgtatattatacatcccggttcaaattgcaataaattgactctatgcgtaagaaaattctagaggttttaacatgatagacagtgtcgaaagcatgcgccctagaaccaatcaacttaacgtagtccttaacaaatcatagcacttttatgatcatggtatggaaggcaacagttttcgtaatcagctacaaattgatatgacattcaacttacacattaaaaaaaccaaacaatgatatttagcgaaactatgatgtgatggatttgcactaactccaaagatcatctaccaacaaaaaaaatataaaatactaaataacaatacgaacaaaaattaccgcaacaaaattacaaacctatatttttatctacgataaaacttttttctatagtaggtatttataatataaacgtatgtatatcttatagttcattagagtttatgttaagatgaattatgttagaataaacacagtacaatggcgtcgcagtagcgttacgtggagacaaacgaatggccagcatttgttcatctgtagactatcgtaacttcaaatatctcaacatactaaacagcaaaactccattcaaacgagcaattttccatgaaaatcctcacactaacataataaatatggcactggcttgtaccgtttcatttatttactacctatttacgtactaaaatagagaataattatgataataacacaattacttacgagtgcgacagtttgactcgagtccaagattgttttgaacacaaggacaataacacggagcgtgagtgcgttcgaaaagagaccttatgacatgagaaatgtttttcaatcttctgcaacgccattggctgccatttgaatagtgttctagctagagtgggacagaggattgaggagtgagtgagagtgagtggcctagacgtcgacgaccattttcttgtgtatgtctgtgttgcccaccacattacagaattcctcgaaggatatcttgccgtcttcatccttgtctgcaaacaggatcgtcttgtcgactatctgttgaagctgcgtgtctttaaggttgttgccgaccatcattttgaggacctgaaacagctccccattggatataaacccgtcgttgtccatgtcatagatgcggaacgcgaaccgcagtttcgagagcttgtcccccttcacgctgaactgggagactccctggatgaactccttgaagtccacctcgccgttgccgtcggcgtcgaagatgtcgatgacgcgctgcaccagcgggttctgctgcagctccggcagcgacatgaactcgtcgatggacagcgcgccggagttgtccaggtccagcttgcggaagcgcttgccgaggcgccggatctcgtccgcgtcgaagttcgagcagagctcccccatcggaatagagttttcattacccatctttatatatttattgacctactgatgtacagtaaataaacgtaatctaagtattcacggcttatttttttagataaaattgaaatcaatcgcaaaagaaatctcacaccatcgatctcgcctcg

SEQ ID NO: 1262 - DNA, 1799 bp, Plutella xylostella
gtattagtagctttccatcatgattaggatcactgtgttacttcatttcaggattcataaaatatagacttttcctcagtgtagattgaaatatagggatttgagcatgtttaaaatttgcacagaacaaggatacattgtttgttaccttagtgcacatgtcagcaaagtgttgcttattagcagtcttatgaataatgtcacaaagtaaatgtatgaagactgacccatgagagcctagtctataagcttcatactctggggcagtggcccataaaatgaggaaatctgatttaggcaggtaataatgattacttcttgaactttgtggaccatctgctatcagtttcagggggtctttatccttccttgactggcatgcttgtattatgagtacttttggtttgttacgaagcttcactgcatcctcagagtcaagcaactgttcaatatcttttacattcaaaggcacagaatctgccccataaatgtgaccctcaattccatgagacaagatgcacaaaatgaaaatgctatcttcatcttggaccttactcctgattgtcttttttatgctaggtaaaatttcatcatgcctcaagtcattgctgatttcaacatgaaaatttagattttccattgtagacttcaggagatctctgtcctttgaagagccttttctagtttccaatggtacagagttaattttattttcaatgctttctttagttggataaaatgtttcttggttaataatgtagcagatgccaactctcttagtatttctaatgtgataagtatcagggtttggctttgtggtatctgcttttagattaacaaaggaaagtttttcctccattaaatgggctaatgaatcatatatgtcattaaaattaccagtaaatttctcatttacagtatatttttcaccagaatttggttcagatacagacacttctggtgtactgtgatgtatcacatttttatcattgcatataaattttgtgttcaattttctttctgcttctttaatcttttgagcacaagataacaggccagggcaattttctataattttaactaatttatccatttcacattcattatccaactgtctcaagtcatttatctttgctatggaaataaatctgcaacaaagcaattcaagtaaaaccagttcagtggtttcatgttgacttacatcaatgttgtaagataatagtgtttttttaaatctattcaaattatcactgttcatctcttcacataatctgtagagtgcaatcttcatagggctgatgtggcaaacaactggactttctgtcgagtatagcttcttgaccgtagggacactgaagccaagtttcctgatgaccccatacagttggcaaaccacgagtgcttccaggaattcgtacttccaagtagcgcgcaggtgagcgtacaccgcccagtcatagagcaagttcagatccttgccactgatgtcccggctcactctctgcagcagagtaagccgctgaagcgccgtttccgggatatcgtatagaagaaacaccagcgaagttatatcgtatggagtcaagtccctttgtacctcagctatcacattaacagtgatattatgtatgtttttgtgaacactgttcaactcctcattctcatgacctttgagagcgtcaggttgcaacattatcgtaacacccaaatactaaatagaatagctaactattattgtataaattattgataagttttaaatttttgagaaactttttcgcacttctcagcactttgct

SEQ ID NO: 1263 - DNA, 1816 bp, Plutella xylostella
ccccctcgcactcgtccgccgtgcagcgcaccgccgcgcccaggtggaaggtcagggccacggaccacgcgctgctggtgttggcgctgttgctgctggtcgctgatgtgccggcggctacctccttcatttctactacaagtatatggtccgtgtgccggtgcagcgtcacatacagcctgtgtggcgacagctgctgcagtgggtggtcggggccgggcaagaaaggcaagtgttcacacacactggctgggaggtgttgcagggttttctcgcaacgacgcgctacgagccagaatcttaattgcgtcaacagcccctttataacattagtatcggcggcatttaaggctgtagctaactcctgcatgcgcggcgcgtgcgggtaggcgggcacgcgcgcgcgcagcctgcccgcgtgcgctcctacagacactaggagttgttctgcgcgcaggcacggtgctgctacactgcaggcgaggacgcacggccagccgcccactgtgcattccaccccaagctcattcagcagaagcttcaaatcagccagtcgttgcctcgacctcacgtgcaccgtgtgagccagcagccgctccatagaaggcgcgtgagggctcaacgccgccgcgactcgctcgccgccagctagggccggaacgtgccacgcgcacaggttgtcgccctctgcgccgatgatgagacggtagccgagctcgcagcctagctctctccaataagacacctgcaatctttgcccgggcgtgtacctatccacctgcagatgcttggacaggcggtctctgcacagcctcagcgtctgcgtgtacagaagctccaacgacagagagcggcagaagaaccggagcgcggcgagggcgccactgagcccggcggcggcgaggcgcgcttgcgccaccccgcgcagccagttgagctgtgagctgtgtacaagcggcttgccctctccggtctcgttgtcctgcacgaggatagcgatgtcgagcagccgccacggcaggttgggcgcgtcacccatcaccgtcagcgacacgctgaaatcttgaccgactgtgaacgtggctcgaccattctccaccttcaaattcctaacatcattaggcagcgacgcagtagtcaatctctgcctgaccacatgagctagcgcccgcagtgtggatcgcttctcggctggcgtgagcgaggggggtggcaccaggcgctcgcggaccacggctggcagccggctgtatgtgcccagagtaagcacctctactgcggccgccatgtggaatgtgggcagtctggcatgaactagtgtttcccgggcgactctagccaatacgtcagcagtctccacaaacagcaatgcctgtttgtccaagaagttcatgatgtgtgcggaccgatccactttggtggcactgctggcccatttcaccagtgcaaggagacgcacaaacagctgtctggtgcgagcactgaacttatagatctcaatcttccgctccatatcggtctttcgtggcaacaactcagccagcacagtgagttcatcgtaggttctttggacaatgaagtcgatcagaaaagccagggatatggagccgccacggggaccgccaccttccgacccctgggcacagccctcgatagccacaggaaccatactgattgattagaactgtatggatatcaaaccaaataaagctttaaatcattttaaggcaaaatcgttacactaaatcaccaaacaatcagtatttatcaaaatacaagtatccaacaaacaaaaatccgagtgatcgacacaaaa

SEQ ID NO: 1264 - DNA, 1699 bp, Plutella xylostella
gtccatgtttttacaaactctagtacaaatagaatgtgagtagtttcaatacgaggtttccataaatatacattcttataaaatttattagatcttcattatcacataatactatagttctgatatctaatttaattatcgtatcgttgaaattgtattaaaatcactaagtaggtggtcacagctccgataacagaagcgaccaacggccggtccagtatgcacatcccgagcggcgagtactgaaccgagcgcagcatcagctgtcgggagaacagctcgagccgcgacggcagcacgccggtggagggcgcgtgcgtcatgagccggcacaccagctcctcggtccttttaccctcagttatggtgtagtggcacggctccaccaccacgaacatccgcagcatgtgcatcgcgcaccacaggaactgcagcaccaggaagtgcacgcgattggtcgatacgataatctccataatcaggaagtatggggtcactatcagatgcagcagcgtggagatgagtatgacgacgagcggcagcgcgtagctgcagtccacgcgctggatcacctcgcagagagagccgtggagcgcccccagtcgccggaccgcctcgcacggggggactgcgaggcggggctcgcctgaaacagcattccgtatgattacagtatggtcctgtgggctcatggagtccactagcagactgacgttggtgggccgcgtactgtctgctggcgccacgcgaatggcaaacatgttcatgtgatgagcttctttcactttctccaatggaaccgcgacgcagctagccgtgtgcgcaagtgcgtcgttcacagctcggaagcgcgcacgcacggacagagccgtgaacgcgaactggagttccaggatcaccaccacgaaccagagcaggtagaagccgatgtagttcgttactacgtcccaagttcgatcaaaccggctcgcctgcctcgcgtagaagcagaagtcatccacaatgagaacggagaacagaaacaacacggacagcagcaccgcgcagagcttgcgttctgagacggaggagtactgcgcgcccaggctcacgtccaggctggccacagactccatgtaccgcagcatgctgcgcatccgcgccggcgccccgtacacgccggcgcccgctgtggctgccactactagcacgtcgcatgttgataccacctgtgacatccgtgaagacatccgcacggacacggaggtgcccacattgatctccgccactagccccagcacggtgcatatcactagcacagtgacgagtatatagctgtagacgcacatgggcgcggacagcgcgacgctgaacccacccggccgggactcgaacctgagcggtgccagcccgaacagactcgagatcctgagtatgaaagcgtgagcgccgtccaccacacaagttcccttctccaccgagcgcgcgcgcggcaccgccgccgccccctccttcaccgggtctatacccattgatattttgataggctacacaaaaatacgacgaaactcgaccatttggtgtcgaaaaacaaagttaccaaaaacaacatttttcacgtttcacattttgacagataaaaaagttgagctgtcaaaaattttcccgccacatttttgtttcgtcgaaatgcgcgtcacgtggcacgcgtgccgcgccg

SEQ ID NO: 1265 - DNA, 541 bp, Plutella xylostella
ccagtagtatgtatcggttgagtgtgaggtagccaacatcaaatagtaataacatagttccaagtgaagaggcttctagagatttagtcatttcccacaaagtcaggaatgtcagaggcacagtcattgcacccagtgcagtacaaaaaattctcatgccttcatatcgggcgccatcatacttgtcccccggtgtctcaaagggaaatttcccatcatatcctgtcagtgaccctgacagagcaatgagcatctttccaagagggggatgaacatcaaagaatagagttctattgatgtaccaactggccatcttgccaaaatgtgtctcatcccaacatacatggtctggtactaggactttgtaaaatctggtggtgaatgtagcagtacaaattactgcaaaagttatccaccatattttatttgatgattgttttgtagaatgatgttcgctttttgcacccatattgtatccctcatgaatattcaatataaatcttcagcacattctaattaagaaatctaacagacagaaaat

SEQ ID NO: 1266 - DNA, 661 bp, Plutella xylostella
ggaatgaagccccccgctgcgcagaactagaccccaaatacgtgctgtcggtcgccgtattcccattcagcgtcttctcctgccccggccccagctggtccagtgggatgccccgcgcctgcgccgtgtctatacacgggatcagctgcttgaactccttgcggaagttctcgttcatccaggcgtagatgaacgggttgtagcaagtggacgacatcgccaccacgtgcgagcagaagaagatcaggaagtagtactcgaggtggatcgcgtagatgtagtagtcattgcacaggttgatcaggttgagcggcagccaggagaagccgaatatggtgaccatggcgatcagcatctggttggtgcgtcgcttcctgttcttgtccagctcttccttcctggagttcttgttgctggcggccttggccttcgctcggtcgttcagcttgaagctcacgcacgtgtagcacacggctatgacgatgaaaggcaagacgaactgtagtatcgatgtcgccgagccaaatagtcgtctcagtttttccgaaggccacgtctcctcgcagtactttccgtacggcagatcgtaatacgtcatgaatatcgcgtacggcgtggtcaccgttatggcgaatgtccatatcatgattatgaccgagat

SEQ ID NO: 1267 - DNA, 764 bp, Plutella xylostella
ccttatcaaccggcaagtttagtgtaaggaagagctatgtatgtccaatatcactatttacaaattatcctacgcactgtacaaatgttccactcgagagagccacgtataggaacttccctctcagaatagaatatcctacgagctacttcgtcatagctggtcttcctccaagtcttcgccagtcagtagagagggctcgccgatggctggcaccatgtgggagtactcactggtcgcccagaggtacaggttgagcgtgcgttccgtacattgtgctatgaatctaacaaacggccgcacatccccctcattagccgtctgcagatgctggtagtacaggtggcggtgctgcttgggcacgatgaccggggggtagccggcctgcatcagcaccaggttcatgagcagccgcgacgtgcgcccgttgccgtccacgaacgggtggatgtgaaccagcttgtagtgcgctagcgctgcgtatctcacagggtgtagatccatggcatcctcagaattgagccattcaagaaactggatcattaaagagggtatctctgagggtcccgggggtatgtggccacccacatacacctgtgtcctcctgaaattacctccttccactggatctacatggccaagcacccttttatgtatctctaatatatctaccatagatatttccctcattctatacaataatgtggagttaatgtatttcatagcagcatctaaacctaaaatctcattgtgctcatctatac

SEQ ID NO: 1268 - DNA, 1063 bp, Plutella xylostella
ctcagtgtgtgtgtgtcgcgagaggccccgcggcgcgacactgtcactcgtacagaacaccgatgagaacaaatgcgagagagggggcggcgaggcggttagttgtcgccgccctcggcgggctcgtcgccgtcgccctgcgtgtccgacgtccacagagtgaggttgtcgcgcagcagctgcatgatcagcgtcgagtccttgtacgagtcctcgttgagggtgtccagctcggcgatggcgtcgtcgaacgcctgtttagcgagctgacacgccttgtcgggtgaatttaatatctcataatagaagacggagaaatttaacgcgagccccagcctgattggatgtgtgggctgcattttcgccttgctgatctcgaaagcgtcctggtaagctttctgtgagtcctctacgacggtatttctggtttctcctgtggccacttctgcgaggtacctgtagtaatctcctttcattttaaggtagaatactttactttctggattactagccttagggattaggtgtttgtcaagcagacccagtacatcatagcagatttctctgagctccttttctactttaaccctatattctttagccatctgttgttttctttcggagccttcggttttctgttcaatggaggagatgacccgccacgaggagcggcgcgcgcccaccacgttcttgtaggccacggacagcaggttgcgctcctcgttgctgagctccacgcccgtctccgtcacctccttcatcgcggccgccatgtcgtcgtagcgctccgcctgctccgccaacttggcgcgctgcaccagttcctccttgtcgacggacatcgtggacgatgggtggctattaattcactgatgcccttgatggaagggtaaaaagtaattaaaccagcaaatcgctacacaatttcagtttttctcttgcggcgaacgatacactacactgacggcggcggggccagaggggaaacaagaaccggaagagggttctcatgacaggtcggccatgccagtttgtctatggaggaaacgaaatatcagcccga

SEQ ID NO: 1269 - DNA, 1743 bp, Plutella xylostella
gtacctatttccaattaattcaatgttttttagtcagtcgaccatttccaacgcgaactttacactgtttctttcattgatcaatcaatttatttaactgtcatagtttccttattaatgggtgcacacttcactgaatgcgcatcgtcataaccagaatccgtcctcgtagggccggatgatggtcgtgtgctacacgcacgcgacggtcgcctggaacggcgggttgtgccgccgtgttgcttgacgtcacctgtcagtgactgtagttgactcgtgctcctccaaggagtgtgagttctgctgcctcgcactcggagtccgttgcggtcgcgctgagccgtcagagtctcgcctgccgcctccatggcagaagcacttgcagattatacgcttaaatgcgaacctaaagtccttagaaaacaaggcgtagattagggggttgatggccgagttgcagtagcctagccagaagagcacggagaagacgatgggtgtgacgcactcgttgcagaaagcgcggaccacgtacacgctgaagaaggggagccagcagaacacgaacccaccaacgatgatgccgagggtttttgcagctttggtttccattctgaagcgtttcacctgcgctttgatatttcttttccccatccttctggttgttcgtggtttgttctcatcacattcatcgtaaaatggatttggagtcaagtggtgggatgattttactctcaatctgctctcggtcaactcgcggccatctctttcataatgaacggcataaagagatgggcttggagacctgctagaagacctggacaggtcgttgttggggcagatctgttccgatgaaggatacgacaccgatatcttcaccttttcgtgggctcttcttgcgctggagtgtcgtcgtaacctctcgggcgaggcgctcagtgacgtgctagtagaatggttgctggccgtggagagcggggagccgtgcggccgcccgcccgagccgcgcccgcggtggatgcgcagcgtcagccggttgtcgtcgaagcggctgcccatgcctttgccagctttagcccccttagtggtccggaacccctggttgatagccttcgtagtcctgacggcggccttgtagatcctccagtaaaaaaacagcataacgaacatggggatgaagaaggagccaagcgccgagtagatcacgtagccggcgtcgttggtgagctcgcacgtccacgggcagtgcgggttgggcgtccacccgtcttgcgatgcctcggccggcttctcatccttccaccccaccagcggcgggaaacaaatgacgaacgacagcacccacagccctccaatcagcgccttggcccgcttccggctcatgatgctggggtagctgacggggcgcgtcaccgccacgtagcgatccagcgagatggcgcacaggttgaggatggacgccgtgcacatccatacgtccactgccagccacacggagcaccacacgccgccgaatatccatatctcgaagacctccctggtggcggagaagggcagcacggcgactcccaccagcaggtcggcgacggccagagacacgatgaacaggttggtgaccgagcgcagcttggatgagcagagcacagctgcgattaccaggcagttacccgcgacgaccagcacgtcaatgagcgcgagcacggcgagggacacgaggctggcgggctcgtcccactgcacctcggc

SEQ ID NO: 1270 - DNA, 3825 bp, Plutella xylostella
ataagggtattcagaatgtaggaatcacatgcttttgttcgtttcatgatggtgttcccttagcgtccgccgtttcataccatttacagtatttacacagttctgcaactcctgtcctggtccttctttatgcaaagtgttagtacatatagcgagcaccatatatttaatcaatttgactataattcagcatcttaccctagaaaattcaccctagaatgaattctgggtaacacatatgcgatagtttaccctaggctacgcaaaaaattgaatttattagagaaggttaaattctcggacataagtttcaacaaattctcctctagaatttgaataatttacatcaattacttggattttcttattaatacattatgaggtcactagacaaatgtggtgctcgttatatataaagtaatgatggaagaagcgacttctacgtattgctgactagaagcggtgtagtcgcccaaagccgagtcagtttctaccctataataagttcattcctaggataaatgccattggaccattgtaagcaatacagcctacgtttgataggcccatagagttttcatagaatttagtaggaatagctgattatagatttttgtataactaattaaatgatacataattacatttgaataattaaaaatatcgtatcgatatcagtgtgtccatgtgaatatgtcgtgagtctcgatgtaatacatttcaatactaagtatataataatatgtgtttttgattcctcggtgtgggccttgacaatttaaagaactgatttccaatgggggcggtgggataattcttatttctttaaatattaaatgattttggttgtcagggcctttaggtgtattttattatattctagttaacaattacttcgatgttcttattaatatatacaccgtattgagttgtaagttacatgtatttgcgttttactgtaagtatctatgtctttgtctccacttataacaaagtacctattgaaaatacctaatcaaatacattgtataattatatctgccaattgactgttaatcacgttttattattatcattgtggtacaatactacttatacttattacatatctaaatatacacagttttcagataaattttgcgcacaacaagagatatcattgacgcagtagttcagtagacgtgctcaatattttgagctttattttattttcccctagacacttggtttgtgtatttagaaatataaagtgtataacaatttatctgttgtcaaatatgtaacattttgaattatattctgatgattcttataaaatacacatgctgttttattttcaccgccaaagaaattactttgatgtacgaagactgtcgatatttgtactaatatattacactttggacacaagtgtacctataaaatgacttcaatttgtcaaaacaagctaccgcttcgcgttaaataataaaaatacactattcattcttaatatttcatattttaaatgtaatcttatggcaagttagaaacttataactaaatcttattgtactaactaacatctaaacgcaataactctaatctcaaaaataaacaattttaaaaaactactctaaaatcagttcttaaaattatggacgttggttttttggtaacgaaagaaatgttgactgacagggtctcaaaattgacccctagacattttgcagacaggtcggttcctgctagtgacggtaacatggggctcagtaggtctcgttgtcgaaccactgccacatcttgggcttggtgtagtccagctcatactcctcgcatctctggccggtgatcctggtccgcctaacacagcgcactatcggatgcgcgcgtcggaagcactgtgggccgagcacgttgaagtaggtgagtccgatctgcccggagactaaggagttggtcttctgcaagcactcgcggaagcgggcgtcgcagctgcagtgggagcgtgtgaacagcccggtattcgtcagcccgtgcctggtctcgccggcgcggatgtagaggcggcaggcgtcgtgctggcggcaacacgtgtccgtgaagaagaagagccccaggtcgctggagcgcgcctgcgcagagtgcccgtcgccgcaccacagcgtgcctggatagatagcctgcactcgtgtcttgaacgtgtccaccacactgctggccacgctgctgacgccggtagccaggccggccacgaacccgcggtcgctgtccagcgagccgtggtcccgcgcgccggccatgagctgagtgaacggagcgctcagccccgtcgagatggacttgaggagcccgcgaccgaactggccgagtccgccgttctcctctctactcctcagtctttcagcttctaaagcctcactttgtttctgcatacgtttgtaaagatcaaagattgtctttggaaccactctctcggctacgctctcgaccatgctgccagccaggccgaagatcagtgataatgcatccacgctgggcggcttggttggcaccacgtccttagcgtcatagtaatcttcaggcacttcttcttcgtcttccaggtccaactctgtaaatattggaacttcgtcgtcactgttacgatctgccgtttcatttgtttttgttgtattgttgttgtcgatcgtcattactttggctttacgtgtattgttcttgtgtttcagatcttctttgaatgttgtatttttgtcttctagttttatatttatggaatcagttgttattgataccgaatcttcggatgtgctgtttaagaattcataatttgttgtactgtttataatatcaaaatttgattgtaatgatctttctgttatatttacagatgattttactgttgttgattcgttcatgttttctaggtcttgtttggtagttgttatatttgtgacagactctgtagtggtcgtggtctcgaattctgcagttatggtggtagggctttcagtatctgcggcgtcaaagttttcaaatgtgctcaaatagagactttgtgtggatgaggggagtgagaatgtagtaacatctatacctggagttgatttctctgtagttgacagcggaataacagttaaatcaccttctgaagtgctatcaactatcttcaataaagcatcttctgttgtactcattacctcaattggcatgaagttggattctgttgttttctcactttcatcgtcaactgtagttttgttgtattctattttatcttctataaatttggatatcttcttttcttctctgttttcattaataacagtatacctatgagagtctttgttattttcatttaactgtttaagtccaaactgtttgctatatttgtcgttgtatgcagaatcaaagtcgatgatgttgttatcaaaatctccatcgttgccggtggtgctataaactatctctgtactgtctatgtatttggagaaggctgtagtagtatagtctaggattaggatggtaataaaggtgaaatgccagtacatctttcttctctctctgtggtacgagtacatgttttaagtggccatctgaattgcccttatatccagttttataaatttgtaccgagtaaaatttaatattccactgtcaacaatcctttcacatacactttaattttaataaattaattaaacataagttcttagtatgatcaaatacttttaactcacgcacaagatttcacgacaaaagtttattgaagtttcatttgtccgcgcgtaaactaaagcgaataatttcaaaatggcgtgcggtgttgccgccaaaatgtag

SEQ ID NO: 1271 - DNA, 2371 bp, Plutella xylostella
gtgcttcaatttcgttcatcgataatatccctattgacccctgaattcctattcaccccgttttacggtataatattaatataaggcatggtaaattgacaagagcattatcttaatcttgaataaattatcattaattgatccactgccaaatctgtaatattaatttcaactacatataatactggatcttacttttttatataaattgatccctcgggtgctttgtaacaacttgcaactaattctattatacatacttgtgtatatctcataaattaatgtatattagagatacaaatacgaagtaccttcgggttggatcgctttgtcgaaagtagcgtgtaacatatttttacagcctgattttatatatttagtatacttgtctcttgccccgatacataataaagtggttaaaagtgacaagaagtgagatacagattattaatagaacttgcacagataagtgaactttactaaccttaaataaaataaattataaataacatttacttatacataattataacttaaaactagtaatatatccgtgaatcataaattttgtaccataaaaaggctgcgccgatttagtcttcctaccactaaacagtaacattataagtctattttattctggagtcaatgaagttacttccgcaatataaattttctgaatccaatctcttcatttttgtaaaaaaaaacatactatcacaaatttacaaatagtcctgtgtagcacagaatattacataggacggtcaacattactcaaggcacttaactcccatacttcacaatgtctgaaactaaatatctgcctcctatataaataaggaacatttgaaggcaccaggcaatgtcttacattaaacagtttaattcctctgaccatgcgtagcccacatgtgctctttgaaggtttcacgcatagtgaatgagcgcgggcaaagatagcagcatagcctgttagtgagatccgagtgcatcagtcgaacatggtacttcagagctgactggttcgaatatttcataccgcagtgaggacagtctccacatatggctgcatgatttgattgctgatgagtcaacccttgcgatgtcgaggccccagctgcaaggacatttatcgaggacattccagccaataacatgagtgcttgtgactgctctgaaccgtaacctccttcggagtcattgtcgtcttgttgctcagacaacagcacttcgggctcataatctgtttcaggttttggtgactgtttttcagactttactaatggttcatcagttggcgttatcttcataggacttttggatgcgttagcttggttggtgtagagtacagtatctgatgtggtgtctttacccacggagcatgggacctcaattttgttattggctttttttagggaagaagtattggcactgttatcacttttggaagggtttatacctgagagtagagacctggcaagcatgctgttctcgtagccgggaaggctgttctctgtctcggaacactcggacagtggtggtgcgggagagtctgtctcgtccggcctctctagtttcactgtcacgggtatgcgttctccttgggtgttgttctgtgaggttgtagagcttttaccattggcaagtgtaacattggactcagttttagtttcacatttcttgtcaacattattattatcaggaacattgatttgattatctacaactttggacaggtatggcagattgtaaatatcatttgagtcaagaactttgcttttcttgtgggtcccaatggtgacatcgttgggtttgtccgaagtactgctccgtctcttcttaagtcctggtaactttgcgtctttttgatgactcacttgaggctttgatgagatggttaactgagtatacagtttgtttgaagcatttgggatggttacagtctctttctgttgtgtcactcctgttaatccttttacttgcagcaaggcagcagtatggagaaatgaggacagtttactttcttcaataaacacttccccctgatacatgtaagacaacaagctcactatatcatcagccaacacatctttcaggataataacagggtgttgacatgggttctccttgaacacattcctgaagtacgggctgcaagctgacaagatcactttgtgggccttgatattcctgccctcgcaagtgagtgtcacgtctacgaggtcttctgagcacttcaatgaatccagtgcattcacaatgttagtttgaaagttattccaacgtaaacaaaattgatctgccattatgttacaattttatagccaaaacagacaaactttggtgaaagacaacacaacacagggaa

SEQ ID NO: 1272 - DNA, 1420 bp, Plutella xylostella
ctttttttataattaaaagacaatttatttagtacttttttatcataccaaaatatcctttaactgtatggacacagaacagatttcacataatgctgggctaccagtgaagattatgctagcgatccgacataatgtagcgacagttttattagttgaatgttaagcacgagataatgtaaaatatacatagtgcattgtagcgttaatagtaatagtacaccataatgatattattactgtgaaatgtagtttttccttcaacgtcgctggcaaaagcctcgggtataagtaaatacaaacttacaactatgtgaccataacaacaaccaccatactcaagcacagctttagtataaaatcagactttgttttacaagaaaatgtccacaaagacaagttcattacaaaagcaacatgttgaagaaataaactcttatttcaagacaaacatcaacctaaagaatgctacttctgttaaataaaaactttaaataactatagtttgtgtggcgaaggtgcttggactcacctcaagattatttggcagcttcttaacacgctaaaagttgcctaaccatcttaaagaggtttaaactatttaaaaaaatcacttaaccaaatatattaaagaaaaggttgccgggagacactttcgccacacagagtgggtatacataatataatttcgtgaaacttagacggagtacagattcttggtctgggagctgtgcttgaccatggtgtccctgtgcacctggaagccaatcttcccgtggatgccgagctggtccttcagcttcctgccgatctccagagttccgtgctgtttggacgcatcagcggtccagataccaattttgtcaaacttttgccttatgtttactacagccccacagatttcctcagcatggtcaaagttttcaccaatcaataggagaaccacatccagccagaatcggtcgagatcagagtttcgttgtttcttctcaagattgatcagccatcggccccccattttgttagcatcatcttcccacatgggccggattccttgcttgaacacggcatagtcgtgaccttgacggagctcagacggtagcttgatgtggtggtacaacctccagaaatcttcaacggtatcgaatgtagtcagctcaataaggttttcttcccaggtcttgtttctgtcattgtcgtagaaccagaggctccaggtattctgcagcgggtgcttgatcaggaactccggcgggatctcggcattggcggtggacttcacgtcagtagtggcagagccttctacgtcctcagtattatttccagccatgtcacaaaaatctcacgataagaattttttgggaaagagacagctcccagggctgccaactttaccagcccaaccaatgttactttttaa

SEQ ID NO: 1273 - DNA, 1271 bp, Plutella xylostella
gaacgattctacttcttatcgtatacgtcggtgagctcaaatttccatatcttgttgggtccaatttccgttacgtacaaatgtgagccgttccgtgttacagccagcgagtgtgggttcgtgaagcccgtggcaggttcccaagtgtccaatatgtttccgtacagagcgttcaccgtgaagcctcttactgcgatattctgcgacgtaggcccgttcacagcatagatcgtatccccgtgtgacgtcacagcgaatacccttcccaacgtgggatcctcaatgatcgtagctggatccatcatcttgatgtaacttttcagtccagccttcggacacacaatcctcatgttctctctgtctgccacacagactatgtctaagtgttctagtagagtcacgctgtgagggagattcaggcttaaagattcggagaacgtcggtatggcgaacagcatcgacccggcagcattgaatttcaggatttgattgttgcaatatccgtcagcgacgaatatctctcccgtggtggccacagctaccgaggtgggcatgcagagaagcaccctcttgcgatatggatagccagcggtgaatgcttcgccgatcgtcagtgttgggtatttgtggttgtttggcgtgtacttgaagacttgatgcttagcaacgtcagtgacccagacgttatcgtggtggtcaacggtgaggccgtggggcatgtagaaggcatgcgagccccaactgtgaagcactgaacccgtgtgggggtctaacactaagatcgtgtcttcaattataggcccttgctcgacgttctggtaggcgtttgtttcattgaaggtactctcgtcccagatgcgttcagctctgtggaagatgaccggctgtcctagagagttgatggagacagctgttatctgtccaacattgagggactgctgcggccagtccttcacctcttgaggccggagaaccacttcatctcttggcatgtgcaggtccaagttcttgaggaagtcatcgttgtttccgtaactcaagtagtcaaagttctccctaaccgtttctggttcgcagttcacatttgcaaaagctgccgcgagcacaattaaccgcaacatgttcgcggtttgttgtcacacaatgtcccaagtattgtctaaatcagttagctgtataaaggcactgtattgattctccccaaggcccactgtacgcatgcgtggttcacaatcgccttgttgcctacgttattctcgcggatcgcaaag

SEQ ID NO: 1274 - DNA, 1683 bp, Plutella xylostella
agacaagaattgaatgaaaatgtgtgggaatcttttaaatcttatgttcacttgcaccaaaaagttaatcaaaattaaatctatgatctcttgctcagacattataccgtcaaagcaagacagcacttgatttaagtgcatttaaatgttagccaccttaactatcatttatatttctggcagaagcgctaagagaattgacaatattctatacaaatatcaatccaatcctcgtctcctagcctcgccagtggaaaacctaataacacactaatccctccaactctagaagtaatgcgtcatcacagccatgactgctatcccggcgagcagggcggcgaggtgcttgagagactgccgtttgtcctgctcccggagtaagtcaggcagcactgtgactagcgctatgtggaggaagccgccggccgtgaacgggactatccaggatgttttcgcctcaatagcattcctggctccactgaatatgactgcagtcatggcgccaatcagacccgctgacgctgtcgcaaattgagctttagcggcctcccaccgcgagaacccgctcttgagcaggattgcgaagtctcccacctcgtgaggtatttcgtgcactagtatggcgaaggtggtgagcacgccgacgcggaagcccaccaggaaggagccgcccaccgccagcccgtgcgtgaagttgtcgatcgagttggccatcaggttcaggtagcctgccacatgtttagcagcattagggtccttctcatcagtcttggtgttcaccagtagcgccttctccttggcctcccgtagtatgcagcggcccatccagcgaccgcccttagagcatttagagcttactgtcgcgttgcagcatgcgccttcgccattcccgttattattgaacatgcaggactcgtacagttgcttcgccgtgacgtcgttgtccccacacaccggcagcgccgccgcgccctccactttagagctgaacttggcacgctgtcggcgctccacgtctagcaacttatcgatctcctcaatctccagctgtttaatagttccgttctgcttggctttaggtgggggggtatcctggtcaccctcttccgacgtggcgaacagtttctctacaattatgaacacgagcatgccgaataggcaccagagcccgcttttcatggatatgtggtcgccttctttagtgctggccatgtcatgctgccaggcctcgggcagcagatgcaggaacacgtctccgagcagcccgcccacggcgaagctcagcaggatgcgtagagtcgccgcgcccgctccatcttcgaatgatgctgtctcatctatgggtatgataaggagcggcaggatgccactgagccccaccaacatagaggccagggctgagaacaaccaagggtgctcatccagttcttcaataaaactgtacaaatattcaggaaacattcccgccacaactgtgcttccagcttccattttcaaatatgaatttaaagttttatcttttacttaaacttttctcttaaattcgcactgaaccagccagtgacagctcttgaataaagtttgtaatttaagattttcgaagtttagggcgtcatttatttatcaatttattggtctacaccgttacgagaggcgaacaagaacatccaaatgaaaacaaag

SEQ ID NO: 1275 - DNA, 3190 bp, Plutella xylostella
ggggtggggggcggcgagcaggctgtggggttgtagggcggacgggtcgcgccgggggggtgggctgggcgactctagggaggagtccttcaaaagccccttcttagcagccgcctccttagcgcttttagtgaggtccccgagcgtagacttgcccacatacgtgagatcttcgaaggtgttcttgctgacggctgtagcggtcttgctggcctccagtgctgacttggacgcttcgtgcatgctcttagacgcttcttctgccgctttcttggcgtggagggttaactgtccgaatggtgcgaacattttcttctcctcgccgtctgacacttttcctttcttgtccatctgagccagcagtccctcctggctgctctggcgagtggtctcccgcaccagctccttggcttgagccgcgaattgctccagcatcgagctttgggaggcttgacggaggacgccgctgcccgtcttcgactggttcccctgtgagtggcttggggtcaacgctcgctccgagtcgctggtgctggagtcggcgacctgctgccggctcaccaccgtcttcggagtggtcgtcgagttcgagtctgattcacggccgaaactgccgctgtctgtgtcagtatacgccttaggtccctgctcactgtcggcgacgacattcggctcgtcgtcagacagggagctgtgctcggagctggacggcgagggggagccggcgcgcgcgggcggcggggcgggctctagggtgccgtattgtagggacgacggtggggagtataccgtttttgggtccaacgaagacgacagtgtcattggagtcatcaccacggcgttgtaggtctctcctatcacgtgctgctggtggttgccacctggcgacaagtctgacgacgccatctcagacacaaaatcgctgagggaagagtatgatgaactggtgctctccgccgcatcagagtctgaaccgctctcgtcagtggcctgcgtctcgagcctctgcatctggcgcagcgcgccgttgagcgagctgccgtcgtcccacaccgggaacctgatgggttccagctggtcctggtaccacttgtgcttgtctccgacctgccgcgggtccagcaggccggtctgcacgcgcaggtgtgccacgttgcacggggttagggaccactctgcgaggaactctaccgcctgagtcctagcgaacttgttcaagaacgccgtggtccgtggccttgacctcagaaagctgttgatctggaaggcgaccacgggccgcgggtacagccgcagcgtgcgagtgtgctccatgaagttgaggagaatgttttgggagttgaagaaacggaccatagcaaccctagtagcgacatcaacggaatccacatcgttcccataaatcaacggattaaactgctggggctgcccctgcctctgcggcgaatgcggcgagtgaggcgcgctggccaccgacgtatgggacgcggtggacactcggcgcgactccgcggcggagccgggcagcgagcgggccgtttctgtgcgggttggagcgccgtgcactttgagtgtggctcctccaacactgtccctcctggacggcagcaggggggtggtggcctgttcggcggaagtgctcgctagactgctaagagcctgtttgagatggctcctgagcacggaaccctcgggttcgggcagcgccggcaggtcctggtcttggcctgtaggaggggtcagcttcgtggagtcgaggtctaccacccagatgtcatctggtaacctgaagttgtttttatgcgtgaagaaggtgttcttgatcccgatgaggaagggcgtgggcgccagcagcagctgctcggcgcacgccatgcagctgggcagcagcgggatggcggggaacatgtactgcagcgggtgcagcatggccaccagcgccagcacggagagcgagagggcgttgtagtcgcgggactggacgaccactttgttttctagcaggattagggtcaggacttttaggcacgtgtccacgcccaacagctccaagggcagatgcagtgggaagtccacgagggtgaaccgggtgtggtccggcagcgcgaacaccagcggcgcgtgcgcggtgggcgagagcacctcaagctgcaccctggtcttcccgggcacaggcacgggtgccgacagtaggcgcaggatccacgtttctatctccttcacgtcgtgcagcactatagttggcgtattgtcgtacgcttgtcccgtgagcaccgaccacactgtgtccctgaagagttgccgggaggcgccgacgcggcgggggctgctcgactcgttgcaagcgtcgatgagtcgcttcagtatgaacagacactctcggaaggtcgacaggaacgggtggtgcgacagcaggcagatggaggtgagagagtggttgcggatgcgcggtctcttccgactggctctagggctgggcgtgtctccgccgctctccgagtccggagccagcagccgcggcgccggcccgctcgactcgcgctccgagtcggaagggccgatgttgctgcttctgtagtcactcgagaaggccgagtctgaagacttctccatggacttcctccaggactctctccgaagcatgccgcggtccgggcgcggcgccgcgcgctccaccgcccggtagaagttgaggcacactccgtaacgcgttttacccgagtccttatccgtaagcgtgaacacaaaggacgaggcatccctattggcggcgccgtggcttgcgcgtcttggccccaccgacacgcagccgtcgggctggcagaagtacaccatgtccagggggagagggaagtcatcgtggttggtgagcgggtagcgacgaagcaactcgggcgcctgtacaggcgcaaggccttttccggaggtgtagggtcgtgccccgacgatggttaggtaatccaccaatcgggggcacaggtgtgtcttctgtatgtccatgccgaccaatcacagcgcagcacacgatccatgccgcaccgatatatcgatcataattgttcacttgctatttataaaaccttatttaaagtttcgtcctcacggtggcacaaagactacatattaaactattcggccgcggagtggagcgcgttttacgtgttatacgcgcttcgcggcatgtcgcggt

SEQ ID NO: 1276 - DNA, 1502 bp, Plutella xylostella
actgggagttccagtggtacagcaacaaccggtccaactcgttcgcgcacagcggtctgctgttcatccggccctcgctgctggcggaccagttcggggccaacttcctcaccagcggcactctggacatcgagggtggcgcgccggctgacagatgcacgaaccccaagtggcacggctgcgagcgctccggctctccctccaacatcatcaacccgatcaagagcgctcgcgtgcgcaccgtggactccttctcgttccgctacggacgcgtggaggtgcgcgctaagatgccggccggggactggctgtggcctgcaatctggctgatgccagcccacaacgtgtacggcacatggccggcttcaggcgagatcgacctggtggagtctcgcggcaaccgagacatgtacaacggaggcgtccacatcggcactcacgaggcggggtccaccctgcactatggaccttacccggagttgaacggatgggagcgcgctcattgggagaggaggaataataggggatacaatgcagagttccatagatatcagctggagtggactcctgacttcatcaagttcagcatcgacgatgtggaactaggccgcgtgtcccccggtgccggcggcttctggcagcacggcgggttcaactcacacaacgtggagaacccctggcggtacggcagcaagatggcgcccttcgaccagaagttctacctgatcatgaacgtggctgtaggcgggactaacgggttcttcccggatggtgtgacaaatccgctgccgaagccgtggtggaatggatcgcctagtgcggccgcagacttctggaacggtcgcaacggctggctgcccacttggaacctggacaagaacgatggacgcgacgcctcgctgcaagtggactacgtgcgagtttgggctttgtagaccacttcgttatttaacccgtggtgtgcgttaaaacgaaacacaatgaaataaagttttcgccgcacatgttatgtaaataaaaagttaaactaatttaacgagtatgtttatttaacaaatacataaataaatactatttatcatacaacgaacactgtgcaattttattcaatccgactttaaaatgcttaaaaatctggaatgttaaggacgacctttatgcagatatggcggccatttttaatccatgtgatagaatctggggctcagatactgctggtttggtttgttggataacggggtcgatgtggacatcatgtaggcagggatgcgtcttcgatcggagaaagggctgatgcgcgagtaataccttcgttcgattaccttatcaaagaatcgggttagtttcacagagttgcttgtcccaggtgctagagatctgggttggtgtgagttgacgaacagctcatcggctccacactgctctgcgatagagctggcgaggcgccggtactggttcttgcgttgcttctcctcggccaggtcgaacttggtgccgatcac

SEQ ID NO: 1277 - DNA, 4180 bp, Plutella xylostella
ggaaacactaataattgtattatgaatttgtaatgtctgaaaagctatggataattgaatgagaaatatcaacatctaataatatttcaaggataatattaaattctcagaaataatttatgaagtgagtgttatacttaacgtctaacctattcttaaaactagtattcgttagttcaagttataaaaaacacatataggtgaaaaacttgccaatgtttatcttgatttaaaaaatctggttatcccgtaaatggacagttctaataagaaagttgtcataggtaataaaactttactaattaataccaaaccgagtagttacctacatacgtcctatcgctgtacggaatctgttcggcactggacagcacaactcatttatgaattataaaccattcctaactcgctcattgcgcgactaaatataaaatacattaaatgttcagaaaatgtcttagctaatataggtaatgtagaatataatctaatcgtcttcgtagtcgtcgtcgtcggagacgtacttgcgcggcttgcgcttgcgcgccggcgtgcccttgcccttgcccttcagcttgatcttcatcttcacggaccggttcgactcgccgtccgagtcttcctcctctttatcatcagactcatccgagttctgcccgctgtcgtagcggcggcgcatctctatgaagaggttgcgcaggcgcacagagtccgcgtagatcagcgacgtgtcctcgttgtacgtctgcgcgttggcgcacagcgtgaagaagtcgcgctccaggtcgccgatgtcgttgtacttgctgtcctcgatcctgttcatgatcttcttgatgtcgatgggcttcttgatgacgtcgtagtagtcgggcagctcgcgcttcgacggcagcttcatgaacggctcggacagaacgcgcgcgttctcgtcggcgaagttgatgatcttcttcatgatgctcttgagtcgcttcttcagcaggttcacctcggtcttgctcttcttcttggacgagctcggtgcctcctcctcctccgactcctcgttgcgacgtctcttcttccccttcttccgcttcttgtccagcacctcatcgtcgtcatcatcttcctcttcctcgtcgaactcgtcgtcgatggccttgagccactccttctccgtgaccgagtccgtgtagtccacctccttgcgctgacgggagccgcggcccagcacctcgtcctcttccaggtagttccagctttgacccttattacacacgacctcatcatcctccttgaccagccagtcgggtagttcactctcctgtattaatcgggcctgagtctccgtcttcttgcgctcgaggtcgatctgcttgaacagctccatctcctcctcgctgcgcgcgatcatctcgttgatgaggtcgtcgtctggcagctcgttctcttcctcctcgtcgtcgccgtcctggtgcaggatgctctgcaggaactgctggcgctcggagccggtggacttctggtcgaacatgcccgcctggatcaccttctcgtccatgttcaacttgtatctggcggcggcgaggatgcgctcctccacggagttgacggtcatgagccgcagcacgcgcacctcgttgcgctgcccgatgcggtgcgcgcggtcctgcgcttgcaagtcctggtgcgggttccagtcggagtcgaagatgatgacggtgtcggcgctctgcaggttgagccccagcccgccggcgcgcgtcgacagcaggaacacgaagtactccgagttggggtcgttgaacttcttcagcagctcgccacggtcttccgccttcgtcataccgtccagacgcaagtactggaatcccctccagctcaaataatcctcgatgatggtcatgcactgcgtcatctgacagaacatgagcacgcggtggccggtgcggttcagcttgggcaggatgcggtctagtagctcgaacttgccggacgcgcggtacaggtccggaccctgcacaacgccgccaccggagccgacgtggtcgcagaacttctcctcgatgtgctggaacatgaaggggtggttgcacagcttgcgcagctgtactatagtgttcatgagcgccttcgcaccgcccttgcccttgttgcccttctccgagccgtccgtgagcagcacgcccttcgactgcatgtgtttgtagagcacgcgctgcagcccgctcatgtcgcacttgatgatgtactccaccttgtcgggcagctggctctccacctccttcttgagccgccgcagcaggaagggacgcagcaccttgtgcagacgccggatgatcaggatcgtctcctcctcgtttagttccaccttctctccagtagtagcaaacggcgcgttgaaccactgctcgaaagtcgaacagctcttgaatatagacggcagcaggaaattaagcagtgcccataactcaggcagcttattctgaagcggtgttcccgtgagtagtagtcggtgcggcgcgatgtagtgcgtgttgaggacttgggtcagcttgcagtggtggttcttcatgcggtgaccctcgtcgattatcatgtacttccagtgcaccttagccagcacgcccttgtccttgatcacatactcgtaggtagtgagcagcacgttgaacttggcggcgcgcatctggttctgcacgatgcggcgcgactgcggggagcccttgtacgacaccaccgacaccgtcggcgcccacttctcgaactccagcacccagttggacagggtactgagcggcacaatgatgaggaagggcccgttgaccttcttcttctccatgaggtaggtgaccagcgcgatagtctggatggtcttgccgagccccatctcgtccgccaggatgccgttcaggttgttgttgaacagcgacaccagccattctagacccttaatttggtattccttgaggtttccattgaccagaatgctggcttgttccgtgacagactcgtggaccgtgtgagcaatactgtagtaagtctgttcctcggtcttgtactcgtcgtcctcgaccttggccttcttgagtatctcgcgcgccttctcctcctccgtcttctcgcggtcgctcttgtccgagcggtgcttgtctttcttcttatcgtcatcgtcctggctgtcgtctcccgagtcgtcggagtcggagagcacctcccagccggggtgcgactccatccagtccttgagctgcgacagaagcggcgcctcctcgcctttcagcacctcgccggacttggggtccatgacgctgacgcgctggtcggacgcctgcgagctgtcgtccatcgcgtcgatctccgcgccctccagcagcttcttcttgcgcgattttcgcttccgtttctcttcctccacttgcttcttgcgttgctcctccttgtgcagcttcaccatctcggtgaggctgccgatgtactcgtccgtctgggacagcaggaacgcgagccgcttgtctttcttctggtcgatcagcttgcggtagccctcctcgtcttctgccatcagcctcctcattcgctccttctcgatgcgctcctgctccttcttctgctcgcgctcggcgttggcgtggtggttcatgatggccttgttcatgcgcgccatcttcgccacgttgttgcggtggtactccttgaagtccttcgcatgctgcagcacagtctgcaagaactcctggtgcttctggcgccgcttgcgctcggcctccagcttctgttgcttctccagcttctccgtggcgcgcgcctcgcgcagcccctgccgcttcgtgcgcttgtacgccttgatgttgacggcggtctcgagcgtcgtgtcgcgccgcgtctggttcaggatctcagcacgcagttgcttctggaaattcagcacccgtaacgccctcaactcgatctgcgcctgcagccgcaggtcctcggagatgctggcgggcaggttggagagaagctccatgcgatgcgcgatgcgggccgcgatgcggtgctcgcgctcgttcagcaccgccagggggtcgattccgaccggcttagggagtgtagtgagacggttctgcttggcgcctggtgtgggcgcgcccggctgctgttgagtggcgggcgtgccgggcgcagtgggcggcgcgcccggggcgccggg

SEQ ID NO: 1278 - DNA, 1902 bp, Plutella xylostella
cgcgttaattttttgtggtaaggccactaaagtctatattttttacgcaagcatattttgacttttacgaattgtcttttcaattattggcacctgccattttctcattgcgttttaggccgtatagattacaacaacagggttcattctcgtttgaagcgctcatggctgtgtaaatacgttttaagtagtcagcttacggtttattctaaatgacaataattacatcactaatatcacttggtgcgtgaagctatcacgcattgctgagcagctcgttggtcattaggtccatggtggataaaggccccgtcagaccggagcgggatcgagaccgactgagttgagctcttctttcagctcccgctaccctcgggttggccttcttccgcggccgctctctgctgaacgccgacccgctctgtagcgcctccataagactgtccatgaccccgtcctgttgccgctccatgtccacgaactgcttgtatctctgctgccggtcgcgccgctcgcgctccgccaccgctctctgttccttggccctgttggcgcgttcttccgcttctcgggctatctggttctcttggtgcgccgccgcaaaagcgtccttgaaagtcttgatatcactcgcaaattcatctagtgtgtacttgttcgggtcgaacacgaagtactcggccaaagacgtgtatagagcctccatcttcttgtacatggaatggagcaggtcgcactgggctctggcgtcctttgcgaacggagccatggtctcgtggaagttgtcccgctcgcactgcggcgcccgcgcggacaccaggtccgtctcgagggagcggatgtcgttgtccatcttcttgagggacttctgtagttgttccatggatactcgcgccgccctgtctatatgcggcatctcctctgcaaacgtcagcgcgtcggggaacttggcctcgatggtctccaccaggtagtgcaggagcgtctgcttgttctccaggtctttagtggacgtcagtttagtcaagaagctgatctcaaacccatacgccccggcattgtgtgaccccgtgttcatgtagttgcccagcaacagcaccagctctagaatcttggcgaacttgccggacgaacgcacctcctcgcaagcggcggtgccggatactatgtccggctttagtgagctaatcagctcctgatagtgttccctgaaggccagactcctcagccgcggcgccaggcgcttgatgtccgccactgtggctgcgaattgttccgcctcagttagggacgagaggctgtccttgtattctagtagcttcttgagctggtccggtggggggaggtactgtataagcagatccagtacattcccattcaacaccttcgtatcacaagtgagtatgcacatcttgatgtggtcgtacgccatgtgcttgagcgagccgccgagcagtatggacaggttctgggcggctttagagtcgaggactttgaggtctttcactttctttagggtgtggactttatcgacggagtcctcgttcttcttagcgacaggtttgctggagaacttctgtgctaacccactcaggatatcgggagacgccagcctgtcttcgtgcaccttaagccagaaagcgttctccgacatcttctgcggtccgatcgtcttccagttggcgcgcttcagcggcccctccacctcccacttcttcttgggcttgaggccgtggggcaagacgtctggttggggcatcttaggcgccatcatgcccatacccatgggcggcggcggcggccccatgcccggcatcgggggcgggggcggcccgcccatgccaggcataggcgggggcggcggcccgcccatgccgggcataggtggaggcgggggcggcc

SEQ ID NO: 1279 - DNA, 1589 bp, Plutella xylostella
tcacggcaccggggggcggtttcttatccttaacgccggcggggcgcggcgcgggctgcggcggcatggtgtgtctcttggcggcctcgggcggcatcgcctcgcgctcctgctgcttctccgccgccgccagcgcgtccatgctcctagacgacagcttcctgtgggacagcgtgcgcgcgaagtgaggcggcgggcggtcgatggtgctggagcgggactcgtggtgcgtgcgccgcgggaagtgcaggcgcgagccgaagcgcgggaagaacgacgacttggccggcggctccggggtcagcagcctgaagaaggtgtgatgctccacacaagtcttccacagcttcttagccgcccgatggtgctgcagcttgaacccgacagtggactcgaactgctcgaactcgccgggtcggagcttcacgtagaagttgtgccgcttgtagctgatcttcaggatcttgggccacgcgaaccggttgatgcggagtttctcccggtgcaccagcaggcccgacgagcacactccgagcgtgatgtccacgctctccgagtccttggcggggtgcaggtccacgccgtacatcgccagcttcttggcgttctccaggtagttcagttcggcttcggctggggtctggcctcgatgagtcttatgcagctccacaaccttctcttccagctccggagtacacgccgagggcggcaccagcttcaactgcttacacaagccggaccccacctcactctcttcataatcacccagctccgactgcagtaagtacgaggctaacagggcatgcgtgacggtggaacagggcaggcggccctcgagcaggtctttgcgaaccgcaagcactagctggtagcgggtgacttcttcttggagttgggcgggttccggagggtagaacttgacggcgaagcgcacgttccagggtgagtgcctcagcatcttggacacgcgcttctccaggtcgacccacacgcgcgggtcccccctgtcttcatacagcagcccgaagtagtccttctccaccaagttgagcttgtcgcacacgcggcccagcagctcatggccgcggatctttctctcgacatccagctcgagcgtggagccgtcgaggagctcgacgttgacgcgcgcggcgttgccggcggggcggcgccgcggggacgcctccttgccctccttggccacgctctccggcatgatgccgcctgaccttcaacacctgttgatcaacaagaccacattaacggcggataatagacccgaggagcagcaggactcactcaacacggtgttttcagcacgtaaacactgtagtttcacaatcaaaagggggaactggtaaataatgcacttacaccacgaatccacctttcttgaaacactaaacacaaatccctgtaaatagggtcctgtcgcttgcagttctaatcagaattgttcgatttcgggactatccaccaccgttttcattcattgcaaagtgaaatcatacgagacgaatggcagttgccgaagcccgaaaaaactggaagcgggcggcagggggagcgcgcgcgtcatccgctgttcg

SEQ ID NO: 1280 - DNA, 921 bp, Plutella xylostella
attattgtcttaataaaagctaaagatctcacaacgagtttgacaaagtgagcgtccaagggcgatgatgagaaatatgggcctacacgatacgctactataaataaagctaattaacataaatgttcaaatgttcgatcagaatgtgacttcactttaacctcagtaaaaggcctctccattttatatacctacagatactagtttacaaaacaagttaggtcagctggatctattttttactggactttttgacatttccaaaggtataaattaaaaagttttgctagtttgaacataagcttttttaataaatattttaacaatttatgataaatgatgacgtctggactttctggcgaaaggacaaattcaaggacagtatccttgaatttgatttgaactaccaagagtatttttacaaactttctgttgccgtgtcataagctggggtagattttgtggccaaatacttgagagctctcgcgattgctggcgggatgggcggcggcgtcggcaagtgggcgccgaccggccggtagccgtccacaccagcctcatacgtcaggcttatgtcttgaccgtctttgtctttgtatgagaacccgccaacaacttcggagtttttctcgtttgctgaatcttcaaatgcccttgttccatcaccagagagatagctgtagtgaaagtcaccggagtgggaatacacaatgtttctagattcgacaattggcacaaccgggtctttgcttctggtcctcttagtattttgatcaccttcttgtattctagattggataaataatctttctctaccattgtcagttttccttttcacgtcgcttgtcacggttgtaggagaagccaaagtggactgtctgacagtatttctaattgtacttgtagattgactagtgggag

SEQ ID NO: 1281 - DNA, 2234 bp, Plutella xylostella
taacttctctatgaataagggggatagtctctaagagtcttattttgagtattcataatataatatataaggcatacattgttttgcagattgcaatcaccagaaactccctattacctatgtgcatagcaatatatagcatacacatacttgcacagttcatcgtttgtcaacttgaaaattatcttatgatactatgtaaataattggttatgtttattacacaatgattacatagtaagttcgtaaatgaatccataaacgcagtactagaaactattaaaaattcgtcaaagcctctggttgggagcaagtcaaggaaaagtacgaccaagttattgctatattcatattttatatctgtatgtatcaataatattcttactgtgatagatacaaacatgttacatcacttggaagacgggcaatttagatatttgtaccacatacattattacaatattttgcgacattaattattcacattaagtatttagaattggtggcagtctgacagtcatcaggcagttaagcgtactcattactgaatgcccagcatcacggcaggctatatggagaaatcgcgaggcagtcacagattagttcctagtacatactttcagcaaaattggaatacttgcacctcgagagatgataccgcattctaaataaaatattaaattgactacaaattgtatttattgtccgtataaataaaataaaaacattaatcacccctcgaggcgcaagtaaactttatgtctgcaatataatagacccaattatataaaagtaatactttgcccatatttcaaagctcatttctagcgaaaaagattagggaagaattaaatatttaaatactttctcgatagtgaaaaatataattatacaagttaatcatttataaatttatcatagaacgacatggacgatcgaaaaaataccgtcgtttcgagtctaaggattcccgcccgtcattttatatcctggcctctacctacaaaatgcatagtccacacacttgcttcacgtataagctaatcaatataagtcgtaataaggaatagtattatattatcaaaatgtcggatttgtaggtaggcgtacatggtttatcataaattaataggtacaaatgacgtaaattaattataaataaaattcattattcgctataatgacatacataacatctaggtataaaattgccttagttattaattaataaatggaaaaattgtgaagtcctaaataccatataaatgttcgcagcataagacttattttatattataatgtggctgtaatattcatattttattttatatatggcatattggtgttattacaaagttataaaaataagttgaatattacaggatagttagtgtgtgtgtgaggggcgcgggtattagaacaacacgcatttcctctttttgacgggctccggaggctccagcgccgcgaggatcgcctcgtcgaacacgttcttcaagcctttctgcgttaaagctgaacactccacatacttcacagccttcagttctttggccagtttctccccctgttccaatgagacgggcttctgcttgatcttggcaagcttctccatggtggcggggtcgtccctcaagtctatctgggtgccgaccagcaggaatggagtcttctgctgatgatgcgttatttctggcacccacttttccttcacattctcaaatgagcttgggctgactacactgaagcagacgaggaaaacatcagtttgtggataactcaatggcctcagcctgtcgtaatcttcctgacctgcagtatcaaataagcctagtgtgtagggttccccgccaatcatgacagtgacggcgtagttgtcgaagacggtggggacatactccgagggaaacttgttggtggtgtagctgatgagcaggcacgtcttaccgacagccccgtcccccactaccacacacttgatggtctgcatcttgatgtaccagtgatgaggatgtcacaacttgggaatctatttgagcagtctcagagttttttttcttcgggcatatcagtgttgccagtgtttggtgcttcccgtggctatttcacttctaggtatacgaaataaacacttcaaactattgtagaagtaaataatacagggaaatcacacatacggcacgtaacgggggctgggtcattgacggacattcgatgacgccattatttgcggt

SEQ ID NO: 1282 - DNA, 1748 bp, Plutella xylostella
actaattactgattaaatgtactaaggtatttaatttcactgaaatgctttgaaattattaagtaggtatcttaggtagttatttttattatgtaaataggtactttctacctacgtaactagtacacttatgcaggttgaaaattcaggttcttttcctcagtatacgccgattaggccctatgttaagcctctaattactctggatcacgacaactcactcgttctgcagcagcttagaagtcaacattgtaataattaataaaatgataaaaagttcgtcaaactaatttaaatagctcactaccttcaaatgtctttacaccgacgtgtattagggagagcactatgagatcagtaggtatgctttcaaatttagtcactttgactttaaacaaccactcacataggtatacagcagcacgggtcccatatccacatagataaacgacatatccatatcaatcacagtacgtgtttatgtgacacactataaacacgtactgtgattggtggaattaatcgagtttatcgacgtcgataacgcactcgtgccgcggggccaggtacaggatcaccatttatcacttgcgaatgtctgtaattcacacttcagtgacgacacacgagcaacagctgggaaagctgaagggaagctcaatcaactttccattggtgtccagggcggttagatggcggagagctttcttttgtttacacatcgccttgtaggttatcgggaacgatgctattttgctgcactccccttcatggttcctgcagacctccactctgacgccctgcagcgtgtagttccgctggttcacgatgtagtaccacttgccgtctctatcggacgcagcccgagggaatatgaccttctcgtcaaagtcacacagttctatttcctcgttctcgctcccgatcctctgtgctatcgccggaggctccaactcatctattctgaaacgactccttccctctcctagattcttcaatagcttctcgaccagctcatcggggtagtcggggacatcttcacagacgccgaggcggcggcacgcgggcggcactcgcggctccagcgcgcccagcggctccgtgcggtcgctggggaacgctatgctgtctcgggtgtgcgagctggatagtgtcacttgtcctctcctattagcaacgataggcttatagttgacaatcttataggagccgttctcgactctcgtgatagggtcgtccatccttgtctgcagtcgtcgtctctctttctcctggatgcggcggaggttggtgaaagggatggagcgaagcgcagaatgttccaggccctcgaggattttgtctctgctagagaggttttcttctgcgtatctcaatatgctgtgcgattcattctcaatcgtagagattggctcaggaaccggatccgatccttccttcttcccaacttcttgcaccttctgcagtgagctggtgagtgagatggatctttcaatcactcgctcagtgagtcgttcagatttctggatctctggcggtgagtcgtcggcgaaccgaccgcgccgctcctgatgtgtcgagccgtcgcgcggagctggctcagactcaaacgagttggatactgatagatggatcagattgatccataggatgcagagaagagtccagcgagccatgtcaacagagttcacttttagaagtcacaaccatcgtcctgtggggtgtcgactcgtgctgacacaagcctc

SEQ ID NO: 1283 - DNA, 2579 bp, Plutella xylostella
gtgggcggcggcgcgagggcgggcggcggcgggaacagctgttcggggtagtagcgccgcagcgggcacgcgcgtcccacttctgtttgtaggtagggcgggtttaccacgatgttgggcgacatggagaggactacgtcgtctgttgaccatctgtcatttagactatcagccttcagagaggcctcttcaaccggcgcaaaaacctcatcatcactacccaactgcgaagctctcagcggatcactgaagtctctaatcgggacaccacaactcaagttcttatcactttccaccttcctcacaaacggtttcttttgcaacggatcatctttgtcttcaactttttgatgatcagtttctagtttcacagattttttctccgtaggatcattttgattatcagtttctagtttcgcagatttgttgtcttcatcattggttgttttgtcttttgtttcttcatcgtcaaggtcatcaaagttcatgcctggctctgggaggacggtttcgatgtcgtgtaggaatgccctctctagtttccagttgtagtaggctaggaggaggaatttgacgactttcttcactttggtgagttctgctagcgagccgccgcgcaggagtatgcagcagcctaagtttggttccgcacagttctctagtatcattagcgttttgttggcgtgtgtctcaacgcggaacgaccgacaggtccccagacgagggcgcacgatgcgcgcgtcgatgctggtcgcgatgtccgcgcccgtgcaccgcgctgtgcgcgcgagcgcacgctcgcgcacgcacgtcgctagcgctactccctcattcctcaagacatcctgcacggcccgcgcggccgtccctctcaccagcaccaccttcggacggagagcggtgatccgcgccgcgcaacggaggaggtactctttctcctgtaatagcactggttctaagctggtgagctttccctcgactctctggtacgctatagaacagtctagaagcaatatcgacgggttggctatctcttgcggcatgcccctgtgagcgacgttcttgccggtgacgacgccgggcagcacgcgactgtcgccggcgacgccgcccggcagccgcttcacttgtacgtagttgcggatgtctatgtcgttgctgaacacgtcgggcacgatggtgtcggcggcgcggcggcacagcgggcacagcacgggcagccacgcggccgccagccccgcgcgcgcgaggcactgccgtgctagcagcaccaggtgttccgagccgagggtacagagcaaggggttgatgttggtcgcttcgggggaaccttcggcttcatctaaaatcgggttttcttcttcactggtcggtgaagcggatggcttagcttcagtcttctgcgtcctggtgagcctcgccgagctctcccccaggttgaggtcgaggcagtacgacgacacgctctcggtgagacgggtgcgttcctccgactccgcttcactagggtagtcggcgggcgggctcggcttgtacagcgcgtagtcggcgaagtgcggcagctccgtgctgcactccatgtagccggctgtcagcagctgctggcacaccgctgtcgcctgcaccctggttttgttcttagtgttatccataacccattgcaagacatcgcagccccgccacacgccgttgtatctcactaaacggtatctgtgttgctgagtgggcagcgtgaacaccagctgcttgaacacatcctgcaaggcctccttcgaggaggtgcgggactcgcagcgctcctcctggtccgtggcgaacatgaagttgtctcgggtgttggtctggctggctgacttgttgtcttggaactttccctgcagattttcttgcagagtcctaagatcaggtgagtctccgcacatgtcattctcgcgcaggtagctgagcacgatgttacaacagtatgtgcacacccgcagcccgcccgcacaaccaaatatttgaccaggcactctctggctacagcagcgggagcagaagatctgtccgcagactcggcagtggtgccggcgacgcagggtggagaacctcgctgcacactcgtagcactcgcgggatatgtcgtccggcatccagtagcgagccaactcggtgtccgcatagcgggtgccaccccctgaccctagtgccaccaggctgctgattctcttcaaaacattaggcaaactccgcccttcaaactcaaccgcgtaagttccagtctcggtcttttcctcatattcctgattattctgatcatccgccggctggctttgccccttgccctcaccttgggccttagtttgaagattctcactgctttcactgggcgaaaacagaggcagcttccagattttgttgaagaaagttgaaactccactttgtgacgattcggactcgaagcgcgggaactctgtgagctgggatgtatcgtacttgtccatcttgatgtacagtacagcaccgtagcttattttccttgtaaaagattcattaaagagagaaattgaagaaaatactaacaaaattcgcagatttta

SEQ ID NO: 1284 - DNA, 1837 bp, Plutella xylostella
ccgcaggccaccgtacgtttagtagtaagggttttacaataactgtaaacggatcaagtttactatttctactgccattttctctcagaagtttctgatagttcccgctagaggcgccactttgtatgcgagaaagcctaaacttataacatagtttaacatacataggtatttaaaccaactatcaaaatatgccttcttacaggaaaactatttattatttaacaatcatcttcatacgttgatagttcttcttgtttcacatttaccttgaactggtattgagccggttctcataacgtgtccatattgtgcagttgggtggctaggtagacagccttcactcggtctgctagttcactcgctgagtagccgagcagttgacggagatcgcagacgaatttgtagacgaatcgtttagccggcactttggagatcatgtctccgtcgtagtagtagcgcagcgcacgagataacttctcgtagttcatggcgggcttcatcttgcgcgcgccccacagccgcgccaccttctcaggctccagcagacggaactcgccttcggtaccgaaccaacgtatgacgtggtagtactcggcgctggtcagcagctccagcaggaactgccacagctgtatctgtccgttgttgccgctgcgcccgccgcacaggtaggagggagataggaccgagccgtcggagggctctaggactagctgtttaggtttcttcttcttgatggcggagtgcgtgacgtccccctgcggcttgttggccggcgtctcggagccgctctcctcgttctgtatcaccgcgataaatttacatttcctgagcagttcaaagtgtgtccaaaataggtcgcctgggtcgtgtggtactttttctttgaactgcaggttggagagctcgcacagccgcgcgccgctcatgttccagtccgacagcttcacgccgcgcatgttgaactggcgcaccgcccactgcacccatacttttacgtgttggactgaccagttcttaggatcactaggtagtggtcggtgcatatcactacgaaatgcgtctgccacaacccagcgcgccgccgccgcgtgtaggggcgccttttgaggagacttctgaggtgactttacttcagcagccgcctcctgagcagcgggcagctgcagcagctcctcgtccggcttcagcacgtccaggatgttgatcttcctctccgcggcccggacactgatgttcacttgcaccaccccggagccccggatgcactgttctacgagggtcttgtggctttctagcattttagcgtcctgcagccagaaagtgtagtcggagagatctgccccgagcctgttctccaacattgtacggagcttcgagagacgggtcctgatgtccattagttgaactatcacctcctctccagactctgtgctctgcatagtgtcgtcatcatcaacagtgtcagagaagaccgctagtggagcctgcagtatctccgacccggactgcatcagacctaaatccgtttcggtaacaaattgaggcataacagacaggggatcagcgggctcaacttctccgctatcgtcgaatgtttcgccgccgttttccatttttatcactcgtacgtttagcagatcgtccaaattagtcacctccattccgacgctaagcgccaaaaccactcaatcacacgtaaattgttgttggataaactttttgtttacaaactttttagattcttaacaggaaacaggaaatggatttgaaaattgcagaaaattaatttaggaaaaggaaatcgttcgagaagggacttccgcgtgcgctg

SEQ ID NO: 1285 - DNA, 1096 bp, Plutella xylostella
catcgtcaatgtgtacttgaaatcacagtttcttaataatattatttcataaattcgatcacaaaaagtgttttaaaaaatacaattaaaataataatacacgtaggtattcattaattacattttatcattaaaataggcagaatctaataagttacattttaaaaaggaataattatttttaaaacacaaattaataaaatagtaaataatgataatagaactactaaaaacaggaacaattttatttaagttgtatcgaccacttgatttcagctagctaagttaacttctgcgtttatccagcaacaggatagacgaaagtcttggccgtggcggtgccgaagtggttggtggccgtgcacgtgaagtcgcccatgtccgcccacgccagccgcgagatctgcagctcgccggagcggaataccctcatcctagcgttcttcttccgaaccacctctccattgttatccctccacaccacccgcggccggggatgtcccttcactcggcacgggaggacggccatcttgccgatgttgtccaagtacgctttgtacgacgacacgatcttgggctcgaagggcaggagtttgtagcgttcggagaggtcggagtttggttcgtgggtgtacactcgggtggcggccctggccgagtgctggccggcgctagcagagcaggtgtaagtgcgcacgagctggtccgtcggcttcactatgagcgtggagacagctcgcccgacgctgctggacgaggggaacagctcgttggattggtggtcgtactcagcaacaggcacgtggtcccgcagccactgtatactaggagcgggcgaccccatcgcctcgcaggtgagctcgagggaggcgccggtgaggttgagcgcggggggcggccgcgtagtgatgcggacgaagcgcttcacgccgagacgcttggttgggacgtcattagcgtcaatactgttgtcgacatccaagttgacggggatgtctttaattttcctattcgtgatggcggcggagacttgcgacagcagcgccgcggcggcgagtagctgaactaacgggtgcatggcagagattctgtgtgg

SEQ ID NO: 1286 - DNA, 2237 bp, Plutella xylostella
atagttattacagcatacttggcatacctcacaaacttttttaaccactcacttcccgctgacacattcgtagaccaaacactagattttaaattgtctctgattcttgggatgtgacaggttaaagaataactttgaataacgtcaggggccgcactagatgtattagtgtttaccgcagcactccttaactccgccaataatttttcacaagctaaagtgaccccgtgatgtagtgcgagcctaagcctggggcacggtccacacgcgagtgttggcgtcctggcccactgacacgatggtctcgtcgtccaaccacgctatgccggtgatctggctttgagggtgagcgttcttaataacgacatgcttagccggctggtccacactccacacgatgacgttggtgtcgagcgagccggacgccacgcgccgcgagtccgggctgaaggccgcgcagttcacgcgcgccgtgtggaagccccactccttgttgtgcgccagcttatactcatcagtagagtacagaataaccttcctgttagcatccgtagccaccaggtaagcggagtcggggctgtagcggacgtccgtgatcgggccgaggtgggtcagctccacggacggggtgagggtgcggacgtccagagtgtacacgcggattatgttgtccgctcctccaacagcgacgtgtcgtgtcttggggtcgatggccacgcaggtgggctcgtatttgagcggcagcgtggactgcttgctgccgccgatcaccacgatcagctcctgcacagtggcgatgatggtggtcccgtcgtccaggatgtggtccatggcgcgcggctgcgaccccagcgggaccacggcctccgtgtagtgggggacctcaccttctccgctaggtgtcgccactcgcagcgagtcatcaatgccacacgtcagcagccccccgtcgcgggtggctcgcatgccgttgacttggttgccgtgcccggcgcccgtgatgtggcggccctcgccgttgttcacgttccatgcggtgacagtgccgtcgtggctggccgtgtagacggtgtgtcggtccgggtgaaccgccaggcacgtgatcggcttgttgtggccgactagcgttctgagcggggtgtcggggttgttgacatccaaatagttgatgactccagacagtgacaccgagattaggtgcttgccttgccagagacacgacacctgttggttctccacagcctgccccatgttgaaagtagtgactcgctcgcgactcgccacgtcccacacggcgcaagtcttgtccccggagcaggacaacagttgcgtcccgtcgggggaccacgcgatgccgtataccccgcccttgtgggctggcgacccgatctctcccttcaactccgaagtggtgccatcgtagaggaagatcttgccgtcgaagccggcggacgcgaactgcgagccgtcggggctgtagcgcaccgcctgcgcgaaccgagtgtgctcctgtttagtgcacttgaacttgaacggcggcccctcgaacacggccagcgtgttgtcctccgacgccgtcacgatccggaacggacgcgccggccggaagtccacggagttgatcggcttggcctgcccgctgatctcgccgacggacgtgcccgtttccgacatgaatacgtggccgaaacgctcccggccctcgccgacggccaccatgcgctggttgtcggcgctccacgcgatgtccttgatgcagcctccgatcggctggaactcattcttgaggatatgctccttgttcaccgtgtcccagatgcggatcttgccagacgcgtctccagatgcgatgtagaagccgctgggggagtacttggctacgttgacttggcacgagtgctccgtgtatgtatccgcaatcgcagggttctctatatctcttataataacagagttgccgttggtatacaaaaatgtttttcccttcgggtctccgccaagaaccagcggcgttccacgcgcggtcctcggcagggcggcgaaagtatacttatttgaatacgacattctgctctaatactttctatgtataacactacactcactacactaaactactactttaatcagtacttatcaatttatttgaataaataacaatcggccgctacaaccccatagcaatccaaagtgacgtatattttttcttgctcaatgttggcagcactgattttcag

SEQ ID NO: 1287 - DNA, 1385 bp, Plutella xylostella
ctaggcgattttattgaaaaagtacgttagttccagacaatacataagtagatataataaactagataaaattatttgtagaattcatattcgctttcatccttcttgatgttgtttttgtatcccttttcgaagtctttcggcaaaacgatgtacctgttctcccggacggcctgcatgccggcctcctggcagatggcgttgatgtcggcccccgacacgcggtccggccgcgccacgaactcctccaggtccacctcttccgacaggttcatcttggccgtgatggtcgagaagatcagacgcttttgacgcctgtcaggcagcgggaactcgatcttcctgtccagcctgccgggccgcagcagcgcggggtccagcgtgtcggcgcggttggtggccatgatcaccttcacgttggtggtctggtcgaagccgtccatctggttcagcagctcgagcaggatgcgctgcacctcgcggtccgcgcccgtttgcgcgtcgaatctcttagtggcgatggcgtcgatctcgtcgatgaagatgatggcggggctgttctccttggcgaggcggaacacgtcgcgcaccatgcgcgggccctcgcccaggtacttctgcacgaactccgaccccaccacgcggatgaacgccgctgtagtatgatgcgcaacagccttagccagcatagtcttgccgcatccggggggtccgtacatgagcactcctcgcggtggctcgataccaatctgtctgtacaactccacgtgtgtcagcggcagctccaccgcctcacggatctcctgcttctgcgtgtccatgcctccgatgtccgagtattgcacatcgggtttctcatcagcttgcagcatagagatggagctgtcagcctctggaggcagcacatccacgagggcattggagtgtttgtgaagagctacagatgctgagggtttgagcagctctctgtctattgttgacagaatcctcacatagtagttggatcccgtagtactgcccactatgccggtgttctggtcaacagcttctaagaactgtccaatgactagcggcacagactggatccttttgacttcttcctgtgcatggaggtattccttcttcaggttcctttgttcatcctttatgtactcttcttgaacttctaagaattctaacatacgctgtagcttcttgtattttgtgtacaggtcctcagactccaagtcatcgaatgtttgggggccagtaaaagctatgcattttgcatctacgatcggatcgtccttttccggcaagataataccaatttcttccatttttatacaaaattctgaaaaatagcacagtgagaagcaatttttcaaccaaacaaaatgtcaacg

SEQ ID NO: 1288 - DNA, 1737 bp, Plutella xylostella
ataagatgcctttgagtagtaaataatttaaagacaattcctctcttaagtaatatcacactttatgcaaaagcatactttcacttttaacatttattaagactgagtcaaatcacaaagcttaactgtaaactaaaccaatacaagttacagaatataaataaaaccaatatctacatacagacagcttgttacacaatgacataatctaaccgtacgacacacaacatcaaatacgtacagattcgtgttgcatccggtactctgaggcactctcgccgcctttgtcatcattgttcttgtcccaatccacttctttcttcaatgacaagggaacctgttgtacaggtggcaggccagaggggcccgctattggttcattccttgggctggagagttgcgtggtgtgcgagggatgcgggaggccaggatgggctatcgcattcagtacactcagacgctgttccggagagaaccgggcaccaagcacagccccaccatgactgtttattgtcatatttaaccctatgttatcactttgagccccattagaacgtattgatacgacatcgtcttctggggaagaagggcgcattgggtcatcgggtggttcatcttttggaataggaggatgtgtcgatgctggagtctcaacggaagtgtcagttctgaatcggcgcactgatagtaaaggtgatatccgtggcggagaagcttcaggtgcatctcgtgcttcaaggtattcccgcgtgtctctgaaatctcgatgttctcgcatttccctcatctcacgtgtctctctcaagtctcgcggctcccgagtctctctcaattctctatgatctcttagttcgcgagactctctaaagtctcgaggttctctgatatcgtgagtatctcgattttcccttagatctctaggttctctttgttccctatttctgtgctcccgtgtctcccttaagtcacgggtttctcttaagggccgactttctcttgtttcagatatttccttagtttctttttcacgagtttctcgtacatcttgtgtttcatgccgttcctctctattatctttttctcgaatatccctaactgctactctttcttgtgtctctggacattctcttatgtcttgggattggcactcttccattggttctggaacgtgtcgcgtatctataccagctgcgcttaacgtcgtcatttcagcaagtcctttcacctgtaggctttcagcagttttaagaagagcaggtagttggcagtactgaacgttgacctcacccttgtacatgaagtcaacgagagtcctcaactcctctagccccacgtctttgaggatgacgatgggatgacgcgacgggtggtccacaaacagggagcggaagtaggatgagcacgctgatagaactaccttgtgtgctctgatagaggcgccctcggagcaggctagcgtgacatccaccaagctttcgtcgtgcaacaactggctgaatacgcccagcaggttgctctgatgattgttccaccttaggcaatagtgctcacttcccatgtctgagctagctcccgccgcttgatgcgaatgggcgcactctgggttccatccgacgagctggcgggctcggcgcactgggcgatcactgggcggcgcgggcggcgcgccggcgagacagtcgcgagctacatgccacgagcccgctgctccggttgcgtcccgcggtcgcgtcgtcg

SEQ ID NO: 1289 - DNA, 1680 bp, Plutella xylostella
atatgacagaacgtattataaaagttgaaatccataatgtatatgttacacaaaacaactagttcttggtgggctcgatcgtttctcctccttgaatctgtccccagccaatcaatcgccaatggttttcaactcttctgctgagcgcgactttctctccgatttccgtgcacacagggttggtgagggtgattttggccaaatcggccttcgtggcgatcacccgcccgccagtactgagggagccgatgtttactagcaggatttcgttcctggtcaatttctgtactttggccgctttcttgtctccttcagtgcggactccgagcaacctcttcagcagataatacgacacttcgagcttcacgaagattcctggcagagcgcccacggccccgagaacctgtccaaccagcctatcagcgcggcacagcgtgggctcgatcttggtgcccactccgatgagtcctccgggcaccgcgtactgcagctcgttctgttccgcgaatagcgacacaatgcgcgagaagatcggccggcaggtcagcttgccgtccgcgtccttgctcactaggcccggtcgcacctcgatctccatgccgacggtgagcacgccctgcaggatggagccgccggccacgccgccgcgcaggtcgtccacctcgcagcccggcttgttcacgtcgaacgagcggatcacgatcatgcgcggcggggacgtgaagtcgcggagaggcaccgggatcttctttgttatgtactcgcagagcacctcaatattatatttaagctgcgcagagatgggtataatgggcgcgccttcagccacggtgccctggacgaacttcacgatctgctcgtgttgctccttcgcctgcccctccttcacgaggtcgatcttgttctgcaggatcaggatgtgcttcagcttcatgatctcgatggcggctaagtgctcgctggtctggggttgcgggcatgactcgttgcctgcaataagcagcagcgcggcgtccataaccgcggctccgttcaacatggtggccatgaggatgtcgtggccggggcagtccacgaagctcacatgcctcaccagctggaagcggccggagcacgcgggccgcagacacgggaagttgtcgtctttgcccgaagaccccgagatgaagctggcgggccgcgggcatttggggttgtcgcatttgtagatctttgcgttcgcgtaacctaatttgatggtgatattcctctccagttcattcttgaatctgacagtttggactccggagattgccttgactactgttgactttccatgggctacatgaccaatggtaccaatgttgatggtagcctgccttgatataacttcaggtgatagagccgatagttttgtgacatccaattcggttagattttgctgacgcaagttcgactggggattcggattacgaccatcactcgatgccatgattggaagacagattaagttactgtcttagtagaaaactatttaacttcacaaaagaaggacaattcacgcttgttttcaccaaaaattggctaataaatcgaaaaatctttcacaatcaagttccttttcgtagcgtgtcgtcgaagtcaaaattttggtgttgccaatataaaaaaataaagccggcaaggcaaacgacaaatgcc

SEQ ID NO: 1290 - DNA, 1142 bp, Plutella xylostella
ctcgtactcctccttgtcggccagctggttggagtcgagccacttgatggtgtcgttgcacttgtccaggatgatctgcttgtcggagtcggtgatcttgtccttgagcttctcgtcctccatggtggacttcatgttgaagcagtacgactcgagcgcgttcttggcgccgatcgtctccttctgcttctcatcctcgttgcggtacttctcggcctcgttgaccatgcgctcgatgtcctccttcgacaggcgacccttgtcgttggtgatggtgatcttgttctccttgttggtggacttctcgatggcgctcacgttgaggataccgttggcgtcgatgtcgaacgtgacctcgatctggggcacgccgcgcggcgccggcgggatgccggtcagctcgaacttgcccaggaggttgttgtccttggtcatggcacgctcgccctcgaacacctggatgagcactccgggctggttgtcggagtaggtggtgaaggtctgagtctgcttggtggggatggtggtgttgcgcttgatgagcgtggtcatgactcctccggcggtctcgattccgagcgacagcggggtcacgtccagcagcagcaggtcctgcacctcctcagacttgtctccgtgcaggatggcggcctgcacggcggcgccgtacgccacggcctcgtcggggttgatggacttgttcagctccttgccattgaagaagtcctgcagcagcttctgtaccttggggatacgagtggagccgccgacaagcacaatgtcgtggatctgggccttgtccatcttggcgtcacggagcgacttctcgaccggctccatggtggaacggaacaggtcagcgttcagctcctcaaaacgagccctggtgatggatgtgtagaagtcaataccttcatacagggagtcaatttcaatgctcgcctgggtggaggaagagagagtcctcttcgccctctcgcaggcggtgcggagtcgcctcagggccctcttgttggtggtgaggtccttcttgtacttcctcttgaactcctgcacgaagtggttgaccatgcggttgtcgaagtcttcacctccctagtgagtgtcaccggcggtagactagacttcaaagataccatcct

SEQ ID NO: 1291 - DNA, 1774 bp, Plutella xylostella
ctgaaaaataactttattctaataattatacttatctcacaattcacagaaatgtccccaagaacaagctgcaaacaaatgttaggtttcagtagttacctaatggaattatcttaaatttcaatagtgatattcttacctaaaatataaacaccaaattagtcactagatcatgttctaaaagcttagttacaatgatgcttgaataaattgtcttctcttaatctgcaaaactgttactgtagtttaacacaatacaaatctgtcttaaaattaaagaaatgctaacataagtatgtaatcaagttgtacataagtatagtctatgtaacaatttactctttgaaataaaatcattgatatacattcctatcatcctgaagtcaaacaaacaaatgatatgaaaactattttcataagtggcagtttaatcctttgctggaacttcaatgactcggggcttgtcaataatgcgggcagtacggttgcccttctccacaatcccaatgatccaggcttggtacccctcctgcttctcaatgtctttgcagtaagcagcagcttgttctcggggcaagcagatgagcaatcctccagaggtctctggggcgtgaccttgcaagagctggaacatgttgccacaagccttggctacagcagccatcttggcaatcacaggcaagttatgaataacaaaagatacttcattcttttggtgagaagccaggttctgagcatgtcccagcagtccaaatccagtgacatcagtagatccgtgggcattgtacttgtgcataagcctggcagctatgcggttcagtcggctcatagagtccatggctctatggtaagctttacggacatcttcttcagacaccacaagcttgatgcgattccagcgttcaggttggtccaaccactggtgagcattcacagctacctgggttcctaggggtttggtaagcacaaggacatctcccattacagcattatcaggaacaatgtattcattgggctggcagatggttgtagccactcctccaatagtgcaccacgggttgatgacagtttgacctccagtcacagaagtgcccgcttccaaagcagaatccttgaacccgcgcattatgaggggaatgacgacgtctcgctccttttcagtcatcttagtggaaacgccgagcaacattagcatattgtcgcactcggtgactcccattgcatacaaatcactcagcacgttggcacacgctatcttccccatcatgtaggggtcatccactaaggggtaaaaaaagtcagttgtttgcaccaaacataggccgccgtggcgaagcggcgtcaccgaacaatccaagccgatgccgatgcgcgggatcgccacatgcataaactggtcctgctcctgagagtagtcctgctgcagggattccacaagttttcccaacacatcttgcggtactttgcagcttcttccttttagatcggcaaaccgcgtcagtcgaaagcttgcctccaaatcgtgagccacagggtcgaatggccgacgaagagccaacgcgttggggttaccggccatctctaattgtgcagcagccaagctatcttgagctacactagactgatacgacatattacacgtaaacacaacaataagacaactttcttggtggtatttctgggtaaaattttgctatcctacacgccgccaaagtgacgcttccaaaatggcgtctcctttacaaagaggaaatgacagcgagaactatatttg

SEQ ID NO: 1292 - DNA, 710 bp, Plutella xylostella
agcgcgcggatgtggtccagcgtgtcgatcgaaggactcaggcctccgtgcagacagaagatctgtccgtcgaccagcgcggtcagcggcaggaagtcgaacaggtccgtgaagtgcttccacacgttggagttgccgtacttgcgcaggcactcgtcgtagaacccgtatacttgggtgatctggcgggactcgtggttgccgcgcaggatcgttattctctcgcggtagcgcaccttaagcgcaacgagcagtgtgacggtctcgacgctgtagtagccgcggtcgacataatcccccatgaacaggtagttggtgtcgggcgagcggccgccgatgcggaacagctccatgaggtcgtggaactggccgtgcacgtcgccgcagacggtcaccgggcatttcacctcctggacgttcgactccttcgtcaggatctccttggccttgtcgcataacgttttgacttgattttctgtcaattgcttgcattcatttagttgttctatccattgatccagttcctttagcgacgccttgtcttccatgttgtgtgtctgagaattaacgtacaagacgttaattgtgttttgaacgtctttaactattaattgtacacaaaaccatgcgaattctataatttacactgtgcccagaaaactgactacggcggaacttacaaaatggcgtaccacttgagtgacgtcagt

SEQ ID NO: 1293 - DNA, 2371 bp, Plutella xylostella
tgcacaatatttattttatagttgattcaaatatatcacaatactttttaaagtccttacgactcctacaaagaatatttagatttatgtattgtagccccattttgcgtaacttttccaatcgttgcttcactgttgtttgtgaagctgtcagtactcgcggcttgtcagctatctcgtggacaggaaatccttcctctatcaggaaatccaagaagctttttaactttgtaacacgaatagttttgagtgcaggtagttttacacacatgtcttcaactgtctctgttgttatatttagtctgtttgctaaataattttgtgtagacatgctatctcccaaaatacttttcgcgtctttggatatttgtattgacctttccaatatattttcagaacaacgaaccatccatgggtaaaggtttttaacaccagtgtctttcactctttgtaatctctctctgatagtggttgggtgatatttgaggacccacagatctctcaaaattctatctccaggtactcccatttctagtagtactttcaatgagttttcaagccaatcagccgacatggtgtaaatgaaatctcttttagccaatttagggcttaatattgcagggggacacttgattctttcagcaatatagtacagcctgttttcacaaaagcctgttgctttatccttttctatgcatttggcaagcttcatcacagttgttgtgtctaagtcgtaaaagggcaatgcatcactaggtgatttaaaacccattttaagaattaacagctccttaaatttattaacatatttgaaatagtttattttcgtgtgcttctccctttatctctgctatgtgatcggcggctactacgtcgcttgtcttcttcagaatgtctacttcttctgttctctttacttcgttcttcttcccgtgatttgagatccctaactcgtcttctagaatcggtcacttccggtgattcggaccagcgccaagagcgccgaggcgtccttactctgttttcgtaaggtgtactgaatgtattgaacaaattgtcaggattcttaaatacatgcatgaagttgcaagctctgccttttggacatcgtctacttgactggagaccacaaatggcatttttccatgaattaatctcacagaattgtaatgagatctgccttccaccgtaccagcgactatgcaacgcgcggtacgcagagatcgctgaacggagctccgcatactctatgtaggtgttgccacgcaggtgcttctcatagttgttacacacctttgaacttttgcattatttcagtcacaatatttttatatctggtatagcttattaagcaaaattaccttttacaatatttatgctataaagaacacccctataaaaaaataaagtagactctaaacatatttttgaaaggatacatcaggatcatcaccgaacagcttcaagtcttaccttaaactggaccacctttccaaatttttcaaactcaggtaagacatcataaaagaagtctttaaaatctttataggtgtcattttcttcatattcaagcatgaggtcagtgtcatattcattataattagaattttccaaaccgaaatgtgtgaaaaagtttgttgccagaagtgttttagctattcctgggtattggtggtttcgtgagcactggtcagcaaagcgacagcaggcagtcttgtagaagaatgggcaggcttccatgccgggcttggtttcccgcagagtcagcagctcctgcgggggctcccgggtgtctcccgacaggaactgctccagcttctccataaattgttgttgctgcttcttgttctcctcttcaatttgtttaagtctttcttcagccttctttattttaatttgctcttcttcccactcctgtcgtattttagcttctttttctatttggagttggtgtgcccttctcatgttttcctgcagtttattccacttggctaaggaaacttcctcagctctcatccatttttgatgttcctccatatttttcttttctatctgttccaattcaaacaactcttgctcttccagccaatttttatattcacttgttgttaagtttgattgaatatctaaatttctggctctctggattcgaatttttcttcttctttccttcttggcaatttttctccattctgtatgcttgcccattaaattttgaagagtcataaatagtatgtaatattgggtggttaatagtatgtaaattacaaattctcaatttccccggtaaacatcccaaaaaccaccaataccaccaaaacaacacaacaccaaaaacaaacatcaaatcatcaaattaaaaaaaaaaaaa

SEQ ID NO: 1294 - DNA, 569 bp, Plutella xylostella
ccgccaccgcgcccgcctcccatgcggtccccgccgccgccgcgtccaccgcggaatcctccgccaccgccgccgccgccgccgcccttgcctcccattcctccggcccatgtgttctgcctctgggctagtgatactttgatggtggacccgttaaaaggttttccatcaaaccattgtatcgccgatgtagcggcattggaatcttcataggtgactgtagcctcgcctttaggttctccagtggctttatctttgtacatccacacttttggcttttgggttttcttatcagtcttgatgataccaatagagccgaaatgttgacacagctcgtcctccgtagtgccggggtccatgccctggatgaagatggtgtcttcctgcgtgaccatgtctccgctgctgccgcctctatcacccccgaatccgccgccaccgccgcctttattataacctccccccctgccgccgccaccatagcctccatctctattccccccatctctattgtagcttgagcggtcacctcctccatagccaccgcggtcgcctcctccggagtagcc

SEQ ID NO: 1295 - DNA, 812 bp, Plutella xylostella
gtcgtccatgccgtcccgtagcgggatattcaccgcgtagtacttgcccttgcccgcgccgatgtcgcgcaggtcgcctgttcccgggaagtactccccgtacttatggaaggacacggtcatcaccctatccgtggtgtagaaggcctcctcgacgccgtcgccgtggtgcacgtcgatgtccacgtacaacacgcgctggtggtacttcagcagctccaggatcccgagcacgatgtcgttcacgtagcagaagcccgacgcttcggacttcttggcgtggtggaggccgccgccccagttgatgcagatctctgatgcctgtttgttaagcttcactgcggcggccacagagcctccagctgatagttgacagaactcgtagagaccatcgaacactggacaatcttcacccacgttaaatctttgcatttgtttgttgtactcggacatgttgtctggtctgatggagcgcaggaagcggatgtagtcgtccgagtggaactttgtcatctcgtcagcagtggctttgtgtggtcggtaaatttccatttttctgtataatccatagttgagcaggaggttgtgcgtcatacgtatgcggtgaggcttcatcgggtgtccctgcccatagtagtagttgccaatgtcactatcgtaataatagcacactcttttcttgctgtgtggttgcatagccatttcgcttattaaaataacactaaaaagaagttaaatcacaaatattaactatttttgagaattttacacaacacgactcggtaaaccacggcgccaagcgtttttctttg

SEQ ID NO: 1296 - DNA, 3094 bp, Plutella xylostella
tggtctataaaaatcttttattaaaaatcactgcaatgttgtgtaatatctagtgcccagtcgtggcatcctaaacaagcgataccgacctcacacggcaaatacagtaacaattactctatattatatgatcttatactctcgacaagcgagactcacgtacattaaactaaacataagcacaatcgaacgaacaaaatgctggtaaatgattgacaaatacaaaataaatacatgtacatcattcgaaatagattggtgaggaatcaaacgttcttacacgaaatagaatacatataaagcgcgccgcccaacaagcgcgataaccttaagttttaaaattttgaaagtgttaaatatgccattttatagatcttccacataccgaatcctaatacacccgtcctcgttataactgtacctataattcttaataagtaagtcagtcctagaactgtttgctcgggcaagctagccgccattgtgtgtgtgtgtggtgcagccttgcggcggccatgttggcagtttgtcgtgttggctgcatggcggcgcgccctcgcgagtgcgtttagctgtagaggtcgtcgtcgccggcctcctcttggaaggtgggctggtcgccgcccgacgtgcccgtgcccgtgccgcccgccgcgctcgacgggaatctgaagttggtgccaaacccgcggctctgctgcagcgtctgcgcgaacatctcgtacttgcggatgtcgttgtcggacacggagcggcgcgcgaacttcatcgcctcctcgaagtgcgcgcgcgagatctccggcaccgggtcctcctcgtccaggtccataacggcgttggtggtctgctggcgctggcgctcgcgcgacaggtccgcctcgatggcctggcggatggcgagcttgcacgcgcgctggcagatctccgtcaggtcggcaccgctgaagccttgcgtcaccttggcgatgtaagtgagatcgacctccttggcgatgggcgacttgcgcaggttggcgcgcaggatggcctcgcgcgacttctcgtccggcagcgggatgtagatcagctggtccaggcgcccgggccgcaggatcgccgggtcgatgatgtccggacggttggtcgcgccaataatgaagacgttcttcttggcgcccatgccgtccatctcagtcaggatctggttgatgacgcggtccgcggcgcctcccgcgtccgacacggagccgccgcgcgacttcgcgatcgagtccagctcgtcgaagaacagcacgcacggggaggctgacctggccttgtcgaagatgtctcgcacgttggcctcggactctccgaaccacatggtgagcagctcgggccccttcaccgagataaagttggcctggcactcgttggcgatggccttggccagcagcgtcttaccgcatccaggcggcccgtagaacagcacgccgcggctgggctgcatgccgaacttgaggaacttgtccgggtgctccaccgggtactgcaccagctcctgcagctcgcgcttcacggactgcagcccgccgatgtcggtccacgagacgttggggacttccacgaccgtctcgcgtagagccgatggggaggacttggtcatcgcgtatctaaagttgtccatcgacacggcgagcgagttcaacacttcagcgtcgatctggtcgtcctcgaggtcgatgaggtccatcttctcgcggatctgctgcagcgccgcctccgagcagagagaggccaggtccgcgcccacgtgtccgtgagactccgccgcgatctgctccagatcgacgtcatcgcccagcttcatgttcttagtatgaatgcgcaggatctcgaggcggccggtggcgtcggggatgccgatgtcgatctcgcggtcgaagcggccgaaccggcggagcgccgcgtcgatcgagttgggccggttcgtcgccgccatcacgatcacgtgggaagacttcttcatgccgtccataagcgtcaacagctgcgacacgatcctgcgttccacctcgccgtgcgtcttctcccgcttgggcgcgatggcgtccagctcgtcgatgaagatgatggccggagagttcttgtccgcctcctcgaacgccttgcgcaggttcgactcggattcaccggcgagcttcgacatgatctcggggccgttgatgaggaagaagaatgcgccagtctcattagcgacagccctagcgatcaaggtcttccccgtccccgggggcccatacatcaggatgccccgcggcggcttgaccccgatggccttgaacagcgaggggtggcgcagcggcagctccaccatctccttgatctgcgccaactgcttgcggcacccgccgatgtcgtcgtagccgacagcgttgagagcctcctcttcttcctcgcgcttaatcggctctccctcacaatgaatgaccgtgtcgggggccacgatgcagtagggcgaggggtcggtctccaccaccttgaactcgacggcgcgcatgccgccgcgcaccatgaacgtgtcgtcgcggtggatgggccggtacgcctccatgaagtacggcttcaggtagacttcgaacaggtttccagtcaaaccctcaacggagtcatcaatgggcagaatatgaactcgcttgccgtacttgactgacgggcaaggagcgatggacacaatgtctgacaggcggactcgcaggttgttccggacgacgcggttcatgcggatcttctcgtcggggcagttgtcgtccgacagcacgatgcagaccgtctccttccgccgcttgcccttcagcagcactgtgtctccgcggaacagctgcagctgctccattttggcctgagataaggcgacgacggagttgtcgtcgctgacggcctcctccacgatgaggcggttgggcctgtccttgcggcggaggatcgcggtggagagatcatcggggcttttgttatctgccatatttatcactaaataaaatgaaaattctaagattcactagttttttgaaatgccgaaagcttctcttcttcaatcaaactaatccaaacgtgacgttgtcgtatttcattt

SEQ ID NO: 1297 - DNA, 921 bp, Plutella xylostella
gcgctcttttgcttttttctctcttataaatttgaaattcgaataccttttttcttacaaagcgccgatatccggatacatgtggggcactccggttccagtctccttatactgcagggggtctgctctgaattcaacagtcttcagcggtaaatggccatagactttagtgaagtagtttatacaggctgatcgtaaagtcatgtggcgggcgtcggctgacagcatttccgtgttcgtgcattccggacacttgaatttcttacgaggcgccaccttgataggcggttgcctggtgacattggcgactaggaagttgatagctatatcctcgcaattgaagtggtcgtcgacccaggttcgaatctcggccggcatcttgtacgtgtagtaccacgaccacagcttgtggtggaacgctgcgcctgttagcaccatggagatctggttggtccactcgctgtggtagcgccaggcggcggcggcggcgtcccacacgtgcagccgcgacgggaaccccacgatgcgggacgggaactcgcgccacacgtcgaaaccaaactccagctcatcaggggtcaacataacgatgtcatcgtcgatcgtcagctggcactcggtctcgatctcgtcgtacgggaaaaatcgattcgacagtttattctctttggtccgaatcactttcagtggcttgttgatgactggccactcgctcgaaggaggcggcgacttcttctggttattccaaaccaccagtatcttggccaggctgggagtcttcacgagctgtgtgatgagtttgaacaggctctcgacgcggtcatacgtgaggatcaccgcggtgaagcccggggccttgggcgccgtcacgggcaggaagagggggttcactggaccatacaaatattcaggtaaattcca

SEQ ID NO: 1298 - DNA, 1828 bp, Plutella xylostella
ggcggccgagcagactcgcgcggcacgtgtggcacgcgaagcagcgctccgtggcgtgccagtgctgcccctcgtgcgacatctggccctggtccacgcccacgggctccccgcaggcgtcgcagtactcggcgaagcacgtgtcgaagcagggcaggcagtagggccgggagtcgcgcatgatgtagcgctggccgccgagctgcgccgcgcactgcaggcacgcgaagtgcttcatgtgccacgcgcgcccctccgcctccgtgcactcgtccgccaggattatctcatcacacgcggaacaccgtggcttcaaggtctcagcatggtgtcttccgcagtacagtctcccctccttccagaagtagaccaggtccaccagcagctcgcggcacacgtggcaggcgaagcaggcggggtgccagcgcgaggcgggcccggcgcgcgcggcggtcacgcacatgtcgcccgcagacatcgactcttcgcacgcgtcgcagggtgcaggcgcgtgcagctgccttgcctggccgcggccgagcgcctcccgcttccgctgtgcgctgaacagcctcagctccttgcgctcctcgtcgctcagcgagtggcagtagcggacctcgttgtcctgcgggggcaactgctgcaacagctgcttgagtcggtagcgctcgcccacgctgttcacatagggaaccttgtcttcaggcagcgcagagaagtacaggtgcacctgttcaggcctcaatcccggcggcacccacgtgtactcttcaagcgcgcagcccgagtcgtcgtcgctctgggagtggcggtgcgggtcgccgggcttcactagcaggcgctcggcatgctccagcagcccccggaacttgcccccgggcagggaggggtgcggggagagcgccgggtgtggtgacagagccgggtgtggtgacagagccgggtgtggtgacagcgacatggctgattgcggcgattgagggtaactcgccctcggtgcgtgggcaaacagagcctccgagccgtcgaacatttccgcccaagagttaaacagtacgtcgccccgggtgttgacgaccgggatgccgcggtccacccagctcactattgaggccatggtttgtaccctagaagagatgaaagctctgaaagtgccccccaggccagcccgctgcgcctgccggtgacactcgtagttggcgctgctcacgccgtgcatgtcccccgtgcgaggctcgttgagggcggccaggcggagcacgggtccttcgcccccggggttcttgtggtgcacgaggctggacgtctcaagcggcgcctgcgcaggtgcgcccgtcgccgcggagaccggtgcgttctgattggccagaagagaccccatccccacatactgccatccgttgttgactcgtatcagcaaggattgctcctgtatgatgtaggccagtgtgcccagtggactgccggtgccgagccgcagtaacgagttggtagttttgaaaacgatagttcccactatcatgcggccgtcctcgtcttcgtcgaagtcggaattatcgttgagagggtccgtggggtctcggaaaccgaattgttcttcccggtattggccaaagttgtttaaacttcttagaatttgtaaggcgtcgcgctgagttggtttgcctggcattttgctaatgtccgggctatctgtcaatgtagcatctctgttccccggtgggccaggtgggcccggcggccccgggggtccggggacagagatgtattggacattagcggcgggggcgcctggtggcccagccggcccacgcggcccatcctt

SEQ ID NO: 1299 - DNA, 2293 bp, Plutella xylostella
cgcggggcgagggcggcgcggccggcggcgtctgcggcgacagcagctcctcggaggtccgggcgggactgcccagccctgactcactagcatgtgactcaggcacgtcaagtgacacgccagcactgggcgtatcttggctctgcgatatgtccagcgagaccgacagcccagtcgtcgtctcaaaggatatggagggccctgattggtcgagcgaggtggtggtgtcggggtgcgcggtggactcggtgtcgggtgtcagcggcgccatgtccaggatgtagatgtgctcgtgcccgatgtcggacgcgtagtgcaggttttcctgggctttgtcgatgcggaagaaacgctccgctgtgcacgagtcgacgaaccaccagtcgacgagctcggagaaggcgcgcgactcgcgcaccagcccctggatgagcgcgcgcagctgctccaggtccgccgccgggtgcacgtccagcgtgcccacgcgctccgccgttttagccagcagttccttatcataatgatggcgctcgtaatccgccattgtgatgaggttcactgtcagagtcaacttgtccaacgtggcttgtggtgcaatgacccggccgggtttcttcttagccagcatgatggcctggttgagccgcgagatggtaatagtcgagggcgccaggcggcacgcctctccgtccacctgcatagggatcactttcgtggtgacgatcttggcggtcttgcactgggtgatgcaggtcccgtggccgcccgcttggagtagaggcagctggtaggtggtgaggccgacgacctcgatcagcccgtcctcggtggagggctcggaggcgccgccggacttgttccacgggtgcgtgccgccgccgtagcttggaatgttaagaaacacgatggcgtggaccttgtgctcgcgcagcacgggggtcaagtccttgccgtcgcactccatggtgaccagatcggccagccccttccacttcctctgcatgaggtccttgccgcccgccgtgccgtagaacaacttgttgcggatgcgggagttgaacttctctgggtgcgcctctctagcttcgtggaactcgagcgcgatgtgggcgtctactccgaacgagaagtagttgttgacgacgttgagcggcaggtctggcttggcgttcttggcgtcgtcgggcgcggcggcggcgttgggctccaccgtcagctgccagcggtccaggagaactgtgtcgctctcgccgatgttggccaggattttcgagattggctcgtcttcgtaacccccgccccagccgagcgccctggcgaggtcgttgccggtgcccagcggcagcacgcccacagccgggcgcgcgcccaggcggtccagcacgctcagcacccagcccacggtgccgtcgccgccgcacgccagcacccgcaggttggggaccttgcggaacagctccagcccgggtccaggtcctccttgagtgagatcgaagacctgtctggggttgaggagccactggaacttctgcagcagcttggctccctggttgcccccactcttcggatttataaacaccaacaccggcttgacctccgacgtcggtatcggcttgatggcaaacgtcttttgttctgatttcatatctttccctttctttttggacgcatttttcttcttcggcgatttccgaagcgacgacttgaagcttccccgtctaggtagttttactatccatgacggcgggactattatggcggattgtgaacctaaacagcactcctcccctatccgctgcaggttgaaacagctctccttgttgtggtaggcgtccttgcaccacgagcagctcagcgccacgatctccttcgagctgaacgacagcttggcttgcagggccttgccgcaagccttgcacttgcccttctccgagcggcgatgcacccagtggtggtgcgtgagcgtctgctcgcggtactggcggatgcccacgtcgcggaaggtgggcttgcacgtgaactgcacccggtccatgagagtgtcgatgcacgccgtgtgcgccacgatcttgcacgccgagcacttcatgcgggacccgtgcttctggcactcggcgtcgcccacgtagcagcagtcgccggacacggaagtgggcgcccacaggtgctccccgctgagcgccgcctcgccccagtccggcgtggcccgcagcacgcgcgcgccgccctcgcccgaccgtctggtctcagtgagcgcctggtcgagctggtccggggcaggtggaggcggcgg

SEQ ID NO: 1300 - DNA, 1128 bp, Plutella xylostella
gccgccgggcagcagcgcgggccggcgcgccacgcagcgcacggcgcacagcgcgtcgtgtagagaacgagccgcctcggccaccacggcgccggacgtgccgcggacgacgacggagactgtcttgccgccgccctggattcctgtcatcttgatatacttgccgctgggctcgctgacctcctcgacgaggtcgacattgaccaggttctctgcggtgaagtggtcgagcgaggcgatgggccggcagcccagcgtcttgcacacgaagtcgatgtcctcgcgctcgatgtccttgatcaccatgcacttgatcttgtccaggaagtggatggccaggtcgctcagggcgtctctcaagatggacttctgcacgagcagcacgttgcagccggccttcttgatctgcttcacgatgttgaggatgtactggcgctcctccttcagcacgcggtccatcgccgcgtagtccgacacgatcacgttgtggtccatatcagtcttaggcggcgagatacagaactgtatcaggcccaccttggccttctccagccggtgcgggccgctgacgttggccgcgcggtggccgatgaccagcccggcgatcagctccgtgtcctccacggtgccgccgacgcgctccagcaccttcacgtcgcgcaggtccacgcgcgcgcccacgccgcctacgatcggctccatcacagtacggatggcctggacagcgatgggggccaacagagtggagtgctgggacaccaccttggagttcagagatgtggccgccgccttcagcagaacctcttcattggacaagtccacgggtgtggccatgctttcaatcacctgtaaagcagatgtaagagctttctggaatccgtctgaaatgacggtggggtggatgcccttctgcagcagcttctctgcagcgtcgagcagcgccccggcaatcaccaccacggtagtggtgccgtccccagcctcaatgtcctgggctcgtgacagctccaccagcattttagcagcagggtggatgacactgatttgtttcagaatggtagctccatcatttgtgattgttacttcaccatttgcagcttggatcattttatccatgccccttgggcc

SEQ ID NO: 1301 - DNA, 632 bp, Plutella xylostella
cttatatttaaagattacacgttagagcgacggcgtggccgtgcgcgctcgtgtcccttggtgcgcacgtaaggcttagtgtgcgagcgaggtgctccaggagctgggccgaagtgacggacggcctcacgggcgttgcggcgtccctgcagcagaacggtcttggcgccagttggggcgcgcagagccagctgatcgaatgtcaggatctctcctccagcggccaagatgcgggcacgggccttctcggtaacgtgcagagcggcgactgacatcttaggcaccttgtagagcctcacatcattagtgatggttcctaccacgacggcaatcatgccctcgcgagtaggcttcttcatgtgacgagccagccgagacaacgatagtggaggtcggttgatgcggctcatgaacagcctacgaagaatgatcgtgttgaacttggagttcgtacggcgagccaagtacctgtatagttttacaagtaatctcaggtacacatcctgagacttgacttcggtgcgcctaactttcctgtcgtgtttatggttgatgtcgatacccatcttgacaatcggatgaaaaagagactatagacaaaaaatattttgacagtttgccttttctcaaat

SEQ ID NO: 1302 - DNA, 849 bp, Plutella xylostella
ctttgattggatgaatagtcagttagtaagtttgacaaggtatctttaaaagtgtataaccacttatgaagctggctgtaccacacgttttacatgtccatgtacttctttgaggatcaaacaaaaaacctagggaacacttagatttgagtaagtatacttaattctagagcgatggctgtagttactgtgtggttgcggacccgttcacttgtttcttggcgtggccgttctctatgacagttttgtcgtccgcgagactcaattccgatactgatagatcttcttcgtctgagctgacatcagattgatttctggggctaagtctgcaacctttggacaggtaactcttcagtttacccagagaagctaatatcaaccccaagaacggcgggctgggcgacagcgggcgcgacaggtactcggggtggaactgcacggccacgtagtacgggtgcgactccacagtcgccacctccatgcgggtgcccgtctcgtctttaccgacgaagcgcaggccggcggcctcgagccgctgcacgtagtcggggttgacctcgtagcggtgccggtgccgctcctcgatcacgtccttcttgtacagttgagttataatactagcttccattagcgtcttcctcttcccaagacgcatcgtgccaccaagtttacccggatgatgttccggcatgtctattaccaatttgtcatcacagttagggtcaacttccgttgtatgggccccttttaaatctagaacatttctggcgaattccacgacagcagcttgtaagcccaggcatatgcccagcattggtttctgtgtttctctgcaccattggcaggcca

SEQ ID NO: 1303 - DNA, 1558 bp, Plutella xylostella
gggtcttgaaaaatgcgtggatgtacaaaatattatacctctaagtactaaaatgtggtgaatgttcatataaaaataagataaattcaaagctattgtctttgtcaacttattatgcgtcatcttaacctaaaaacgaaataaaactattacatcaaccaaaaacaccttccatacttttccattgcaactatttacacgggcaagatatcatagcatttgaacattttcaacacaacttatttatataaaaatagctcatgtttcgtaagtgataaggtttatttggccctgcgcgtcctcaggaccagggcgatgtaggccagtagtctgaaccctatgaagaggaggatcatgttcacgacgtccattgtgaagtctttctcggagaagctaagcgtgtccagcacgacctgccctgaagccggacaggtgaagttctcccgggtgcacgcgatctgctccacgcccgtccactggttcaccagcagcgcctcgttgccgtaccggaaccaggataagtaggagatccagctcaggtaggggggcacggatccagagttgaggaagaaccctccgaacagcatgaagggtatgatgatgggcggccccacggacgccgccatgctcacgctgctgctcgcgcacgagatcaggtatccgaatgacgtggccacattggtgatgagagccgccagtcccgacgcgatgaagaaccgttccggcgcggggttcagcccgatcatgtagtaagcgatggtggtgaagacaagtggtatggtcgcgaacaccggcgcctcggccagggtcttcgacaggaagtagacatcagctcggtacatccccgagtggtgctctcggatgaagatgggcagttccgaacagaatacattgatgacggcgaagatgttctggaaggtcatgttggtgaggaacatgaagatggccccgttgatgttcatgacgccgtcctggtccaggttctgaccgaagtagatcactccgatcaggatggacaccataatagtctgcaagaagcgcactttgatcagcatgggctccttagtcaccgacagccaggacctccacagcacggctctgaactgcgcgcaccacgacgccttgtagggcgaccggcgcgtgcgcatcgccgtggtgcccgtccacgccgcgtccgcccagcctgacgtgatcttgcgctgatacataagcgcgttctcagcctcggcggcgatacggcagccgatctcggacttggcgaaggcggtgcagaccgtgtcgatggtgtgcttggtcacctcctcgcggccgggcgtgcccgccaggagctggatgaagtggtccgccgggttgtagttgggggggcaggctgcgcctagctctttgaagaactccgtagcctggtccggggagccgaggaaggccaccctgccgtcggccatgatgagcagcttgtcgaacatggcgtacagctccgacgacggctggtggatggtgcacaccaccgtcttgcccttctgcgcgagacccttcagcacctgtataacattctgtgcca

SEQ ID NO: 1304 - DNA, 1564 bp, Plutella xylostella
cccagcgacgtcttaggcgaatcgcgatatacgtgacgtttatctacaacatatgacccgtgcagcggagacaggggggcactctatatgacgaaaaacgaagcttcggagcgcgagccacaactctatcttgtacacgctctttaccgattgcacgactgctcgcattcattcatttttcgtcagtataaagcaacactccaggccccacagcacgggtcagttatcgtcatcaacaaacacattcaatccccatccctcccacaaaatcgccttacttatgacgtttcgcgataaaaaaattatctacgtcgataaacgctccgtgctgcggcgacaggcccagctccctaggtccgggtgagcggcgcgggcacgtcggcggcggcgaggcgcagcgcgcgcgacaggtccggcgcgacgaggggggtgggggcggtggcggcgggggggaggtcgtcttgtcgctccgccttggcgactagcaggtgcttgagtgtctcgtacgtgagccagcagatcgccgccgccggcatctggtataagatgcgtgcctgcacgcccttgaagaagccgagcgggccggtgacgcgcaggatgtgccccgccgcctcggccagcccgtccgctcgcgccgtcttctcctgagtattaagcacagtcttgcacacgtcaagcggggtcgtggcggcggccgcgagggccccggccgcggcgcccgacagtgcgtgggctcgagggtcgtagccgcgccgcgggttcaccactgactgacaccactcgtaggtcacgaagtggagcgactggaagggcacgttcatggcgagctgcgttccgtacgagcggtagaacgcgcgcagtccctccgcgcggtacacgcggcgcgcgcactcccacacgccgcggtatggcgagttcagcatctggagacgctgctttatgacttctgtgggatttgaaactgcgtcgtgtattactgaagccaaacatccggataagccgtgtgtgatgtggtcgtgccggtgccgcgtgagctgcgacagcgtgtgcttggcttgctcgtacgtggcgaagaagcacgcgtgcgccgggcccgcgcccatcaccacggcggacatgccgcgcacgggccttaacagtccttcagttcgaaccatatatcgaaacgtctctgtgatcgtgctattgtgtgcgctccgtaaagactgcatccgagtctttacggagtccagcgggtacatgatgcagtgctccatgatccccgctatggctccagcagtcatgtgtgtgactgaactttgggttggaagggtttcatagtcttcaaagttcataatactaactaatactgacacttagcacaaaataaacacaggttcaggatgtaagcggcggtgcaactgaattttacctaatccgcaatatcattttcactgcactattttcgtatcaaagtcatcagaaaattttaaataaaatttttcaacacaactcgcgagcgcacacgagaaattgcgaatcgttcaatttttttctgattatattttgacgtttcggtttcgtt

SEQ ID NO: 1305 - DNA, 1512 bp, Plutella xylostella
cacctaaatacaaataaacagcaatacatgaaaacacattttacttccagagcttcttgatagacatattcttctcggaatccttctgcatgaccttcgccactgccatctcaaagtcctcctgagtgacgtgcactctccgctcgcgcagggcgtacatgccggcctccgtgcacactcccttcacctctgcaccagacgcacccggcatgagctcggcaatcttgcgcaggttgatgcctctagtcaagttcatcttcctagagtgaattttcaggatgtccaaacgggcttcctcgtttggtggggggaactcaatcttcctgtcaatacgaccgggtctcagcaacgcagggtcgaggatgtcaattctgttagtagccatgatgactttgatgttctttgttgcttcgaaaccatccagttggttcagcagctccaacatggtcctctgcacttcagagtctcctccactgcctgactcgatacgagaggaaccaatggagtcaatttcgtccataaagattatagagggggcgtgctctctcgccatgacgaagagttctctcaccatacgacttccctctccaatgaatttctgcaccaactctgatccagacaccctaatgaaggtgcactcagtgtggtgagcgaccgcgcgagccagcagcgtcttccctgtgccgggaggcccgtatagtaacactcctttaggctgagcgataccgagggcatcaaacagctcaggatgtttgacaggcagctcgatgacttctttaatctccttgatctgcttgtccaagccccccaccatctcgtacgtggagtcgggcaccttctccaccatcatgagcgacaccagtgggtccaccttgttgggcaggattttgtgcagcgtgtagctctcgttgcgcagcgccacgcggcagtttgccgtcacgtcgttgatgtccacgttcttgtcgagatctactacgaatttaccctcagggtggactttgacgagaaccttcttcttgtccatgggcttgacgacctcgccgacgtaggagccctgctcctggagtaactgcagctcctcgcgcagcatcctgaccttcgcgttgagctcgttcctctgcgcctgcagtcgccgcagattctgggacttctccgccacgataagttgaagctcctcgatcttagtgatgtagtagggcctgaagccctcccccttcacggggtccacgtccatctttgtaatggtcatgctggagctttgtttaagctaccacatgaaaggatagaagtgagtttcggaagaaattatgaataaaatcggcacaacaatcctaaccactcaaacaaatattttccaagtcatgattttggggttgccagtaaacaaaattaaataattaaaaaaaaacaatgctaatagtgatgggacatgaggcaggatcatgatcataaagtttattacttctatggtcaggatcataaagttatagtcagcatccagccgagccggat

SEQ ID NO: 1306 - DNA, 1755 bp, Plutella xylostella
acaggtttttattggcataaaagcgaatattaaactttcttctttttctttctactctgttctttttcttgcgctttactctgtattttggctacattttcagccttccttttgattttggttatctttccgatgacattcttgaatcggtcatcctttttcatcagactcttgttgactttcctcaatccgtcctttatgctggcatctatatcttccgtcctgctctgtgttaggcggttctcttgctgtctcgttccctcatctggcttcatctgagattgtagttctttaattttagccaactttgcctttttcgctgctctcactcttttgcggcgcatttcttctaatccctcctccatcatctgggggtcgactccggcctgtctccaccgcttgatccggtagttcttcttgcgttgctcgaactcctcgttgtctagttgcgcctcctgttctctcttcgtcacgctgactgtcgtgaatacttttactgcttcgtcgtcatcaaccttatactccgtcagtttagtgttgatcttgtcttcgatctcgccgaggcgcagtatgtcgtagggcgtgatgagagagatcgccagccccgagcggccggcgcgggctgtgcgaccgaccctgtgaatatactccttaggctccagcggtagcttatgattaacgaccaagttcacagtgggtatatccagccctctcgcagccacattagtagccaacaatgtgctcttcaggttgcttctgaactggctgagagccgccactctgtcccgttgtctcatgaagccgtggaggcacacgttgtctatgcctattgcgttcagcatcattgacaggacttggcagtctttcttagtatcagtgaacacaacaacatgtccgctcgggtgtttctccctgtattctcgtaacgtctgcactagatacacgtcgcgcgcgtacgccggacacaccacatagcgctggtcgagtgtggagactgtcagttgagtgtcggtgtccgtccaggttagcaggtgatctctgttcaggggtagtatcttggattcctttacgtcttcagtgatggtggctgaaaacagcaggttctgtcttttctgtgggagagcctcaaatatggtctccaagtcatcttgaaaggattcaccaaataatctgtcagcctcatccaagaccaagtacttgatcttcttcagtgtgaaggtgtcgcagccactgatgtggtcggccagtcggcccggcatcgccaccactatgtggggccttttagccaacttgagggcctcttcgagctggtcagagccaccggtgactatgcagactctgagctttaatgactggcctagtatgctgaactggtctgcaatttggtatgccaactcatgtgtaggggtaagaactagtgcaaatattccatatgggtcttcagcgagatgttgcagtatcggcagagcaaatgcaaatgttttccccgagccagtcttagcagccccgatgcagtcatcaccagccagtatccgcgctatacaacctttctgaataggggtgggtgacttgattcccaatgaatgtagttgtttgattagccatggtttaattcctaattctgcaaattctctttcgtcattttcatccatatttaatacgctgaaattgctgatcaatattgaagaaagcgcgaataacttgattttagatcaataagataccaaaacaacacaaaatctgcacgtgtttgac

SEQ ID NO: 1307 - DNA, 2596 bp, Plutella xylostella
tcattagcaaataaattaaaatgtatgacgtaaggtttaagttagcaataaggtataccggaaaaccaatctacaaaattaagtagaatgtttgacttcaaacctttcattattgcaagaccctttaacttattgtacactatacttaattagttactatttaataattattttgtacaactacagctgacttgtcccttgaatgacttgtttcataccgggtttcagcttcggcaacctggtatgcaatatcttccgcggagacgatggatgcaccaggtcctgttggttctcccagtggtaatatttctcttgctgcttctgacgccgccggtccacgtagcttatcacacaactagcgggtatccacacgatggccagagccaacaccaccacccctacaatattgtctcgcaggaagccgagcacgttgttgatgttgatgtcctcgatgatgtcccagaagcgctccactacgtcttgtatcgtcttctcgcatacacccttattacagaagccctgtatacagggtgtgccgtcgggcaggatgtcgttgtgcgcgacggggaagcaagtcttgttcagactcttacggcaacatcgcttgcacgcatccgccacgatgtcgcacatgcaggagtgcaggccctgcgtctcgcagtacggcacgcagctgccgttgcggcaccgcccgcgctccaggcactcgtgctcgtccgctatcgccggcgccttggggcagtcggccgaggcgccgctgcagacggcctctccctcgcacgcggtgtgcgccgcctcgcgacacacgacccctggcggcgcgaacacgcaaccggcgcagcatggcgagttcttgtcgctgcacacggccccttggttcttcctcagtttgcagtttttgtcacagcacatgtcattgtcttccgtgcccagcaagcccgcgtcgcactcctcgccgccctccacgcgcaggttgccgcagaaggattcctcgggctcggagaagcagcgccccgacttggcctgcagcaccttgcggatggagcggaggctgcatggggagaagcgcttattattaacatcatatccgctgacactatacgtgtacatcagatacgacccgccctggctagccgggggcgagcactcggccacatctgggtcatgttccgacccccagttgtggccaaactcgtgtgccgtgaccagatctgcctctcgggtgatgacacgctgaccgtagtggttgcgagaggatgacaggccggagtttaggtagagagtgtagccgttcttgaagtattctggcgtgcagatccctcccacagagttccgtctggggctgcccacataggccagcccgaggatgccgccctcgaacttgaggtccgtgaacaggtgcgccaggcagaagtccttgtgcgagtattcgcggctgaacacctcaagcaggttccgtacgtcccacttctcgcgcaccatgttgtagtgcgcctcccccccgcgcacgcgcgtcgcctccgagtggactaatatcttcttgatcacgaaccccatgcctttgaagccgtccatatcctgccgatcttgccagactgtgtcgttgtatattttgtgcacgcgatcaatcaggcttatcaaataactaatagtagtttttgtattactagctcccatttcctgaaaaaacctgtagtcagcaaccagtaacaatgggcacctagtctttgttggagtgtattcatagtcactttgccgtttcatccttctcttggctgcagtattcatagtctgatcatctgtttccggctgcttgttttgattctccatgtatttgtccttttctgactgttcatgtatcgcttccaagttgacattgtctgtatcttcttcgctgtcatcactttcctctagttctttcccctctttcacatatccacatggtgccttaggagtggagttagtcccatcagcatcggcccagctgaagtggatgtccgaagagcggtaggttatcatgttcttgtccccgaggtctggtgtgtgacgccaggcaggctcaatgtggtaagtctcatcgggcatgtgtatgatgccggtgatgactccgtcctccatgtgcagcttgacgtcagaggcctgctccccgaacactcgccccgtgtagaagttgtcgcggtcaacatggactgtagtttctttcccatcaccatctactgtgtaagctttgaaattcgaatgcaagactgagctgtgggggtgcaggatcaacctgaagtctttgcccagggtcttgaagtgtaactcctttatagtgttgaatggatgattggaatgcttagcacccctcttcacaatatgatggacgaaactagacgcatgaatcgtctcgaaatgcttcaaattacggtaaatagaaccctttatttcgccgctgaatgaaagtagaaataagaaaggaaaaagtatgatgatctccattgtatataattttttttttttttttcttaacctctattgtcccactgctaatataattatgggagtgtaatcaactattgcaacaataaaatgataattaattatatgtttatct

SEQ ID NO: 1308 - DNA, 623 bp, Plutella xylostella
ccgcagacatcgactcctcgcacgcgtcgcagggcgcgggcgcgtgcagctgcctcgcctggccccggccgagtgcctcccgcttcctctgcgcgctgaacagcctcagctccttgcgctcctcgtcgctcagcgagtggcagtagcggacctcgttatcctgcgggggcagctgctgcaacagctgcttgagtcggtagcgttcgccgacgctgttcacatagggaaccttgtcttcaggcagcgcagagaagtacaggtgcacctgttcaggccttaatccgggcggcacccacgtgtactcctcaagcgcgcagcccgagtcgtcgtcgctctgggagtgtcggtgcgggtccccgggcttcaccagcaggcgctcggcatgctccagcagcccccggaacttgcccccgggcagggaggggtgcggggagagcgccgggtgtggtgacagagccgggtgtggtgacagagccgggtgtggtgacagcgacatggctgattgcggcgattgagggtaactcggcgaatgctgactgctctgagggtagtctcttcgctggtagttgtataggtgtggtgagctggactggctgggctggggcgaggcggggtagggcggg

SEQ ID NO: 1309 - DNA, 4267 bp, Plutella xylostella
cttatctttatatttaaatctgaaatgatcagtcatttactcgaaacgaagccagacctcaacagggttcacataacacaagttgtccttaaaataaacattttattaaaacacaaaaagatattcaatgagaaatgccaagaaccatttatctgttctcttcttaattatttggacctttttatttctagtttttcaattacttaattatatctgtaaaaaataagataaaaacatgattattttcaattcattgcaggtaaaattttgaacaaattgaacagaatccgaagtatattgttaaaaaaaacgtgcaaattataatttatttccactaaaatgctcaaacaactactttacttctttgtaataaaagctctgattataaatatctgtgttttaatgtgaaaataggattactaaagtacgcttctaaagagacttgatgacgtctttacaatatggtttaatacatacacagtaagtaactaacataactgagactctgtaaacacacacactactccagtaatgcgatttccaaactaaatcaacacattgatatttgtattgagagctctctagattccgttcaatagtaagtaaaatgcatgacgtcgtcatacgtttctacttactgtaactcctgaagaatcactttaaataacatactgaaaatttgttatctactatataaaatgccgtttacactcttgcaaaactattaacagtgctaagtatttcattggaacactaattaaattgcataaaaataaggggaaacgccaaattgttgtgattttatggatacacgtcattccaatgcatttaaatgaacatttaaatgaacggtcgcacactttacgattggcttttgcgctattatctgcagttttgccagagtgtacacgactgtaaacattgctaagataaccagtcaatagttaaaatacaaaagaaagttttgcaaatatattaaactaaacaataataataaaatgagttggtgagtgccttaattaatacgaaagaatttaaaaaaaaacgtgtgcaaatccactcaaccatagaactgttatcgaagcaattattcactgaacttcacatgaaaagtccaactttataggccacattgctattttattttaataatcacacattttacatttactaaaattgcaattttattcgccatcaatgaatgtgaaatgtgtaagtaacgtgacccataccaaccatacaatattgcaaatgatgtactagttacgcttaaatgtttagaacctttcttatttattaaaagcatttattttatttattacttaagtttattcacagttaattatatacgtattcttattgccactaacaaaatcatcaaggaaatgagacgtttttaattaaaaataattatttactgatcattcaaaaataatttcaaagcggaggacattacttacaatattgaacagtaatatgatgcgaatagataaagacacttgtaaaacattaccccacttcttgtgtagtcgggtataaaatagtcaccaaatggatttaaaaaatgtcattagatcattactttaacgttcaaaggtgttcgcaaattaaaattgaaaacacacaactattgttacttacgttatattaatgattgtttctttacgcttaaagttgaatggattgtatttattagtatattttttactatggtatttgtaccgcttaacatagagacttgaatattgaaaacaatcattcatatcataacatacaaccccggcaggcgactgtgtacttaaatgcactttgtaactgagttacagtcacttgttacacaaaaatatattttagctttataatctggggaagtaacgggtaggtatagacattgcagctacttcacggttaaggatagaagaagatacctctttaagagataaacttggactgaacgggaaaaaaatgtggtgatatagaaaggaggcacttgaaagaaagggaaggacgaaaaaaccaagaggggatgtcaaaaatccacgatataatcgctaatctcttccactaaagggcttaataaaactctggatcttattttaacacaataggaagattgtaaacaaaccctcggaaacaaaccctcacaaaatgctctttttctatatttcccacaataccaacccaggcaagaaacgagtagaaaaatacttcacttgcgactggaagttaactgtaagaacaagaacagtctatttctatagggttggcattcgactcacttctcaaaaaagaaaactaggaccatagatccagacatagggaccctatggatcgtaggccttttttctgagacacttctcaaaagctttcccaaacgaaatacactagaggatatggcaaaactggcatagcaagccgaaacgggagtcattctaaacaattttgctacgaatttccaaaagtcgctaacaacgaccctcagaatcaacttactacaccaacccccaccatttccgcattaaatcctcaatcctcaatccgccccaaccgtccaccctacccgcccttcctcagacacctatccacggccgcccgccgccccctcactcagaacctggcgcgaatgtacacggcactgacgtcgtggctcgcgtagccgaggcgcttggcgtgcttgaagatctcgttggtggtcgccgtgagagggagggactgctcgagggcgtcgcccagaccgagggcgagcttgaggtccttctgcatgtgggtgagtggctggtgggtggagtaggaggactcgatcattgctcgtcccttgagtataagatgcggcgaggcgagcggcgtgagcgccagcacgtccagcaggtcggcctggctgagcccggcgcggtccgccagcgccagcccctcggctagagcggctagcgacacgccgcccaccacttgaaggaccgagttcattttggaagcgttgccgatgtcgcctaggtagaaggagttcttgctcatggccttgaagcagctctggcagtcgtcgaacagcgagcggtcgcccgccgccagcaggatcagcgtgccctcctccgcctgcgtcttcgagccctggatctgcgcctcgaggtagcggccgcccttggcgccgacggcctccacgatgtcgtgcgacgtgtccgcgtctatggacgtcatctccacgtagcccttctgttccaaggaagcgcagtgaagcacgccgcagttgccgaacaccatctccttggcggcctgcgggtcggcgacgcacgagaaggtgatgtcggcctcctccaccacgtcgcacggcgtcaccgcgatcgtcgcgcccaccttctcgaagtccttgcacttagcagccgtgcggttccagacgaccaccttgtggccggaattcaacaggttcttcacgatgccgctgcccatgatgccgaggccgaggaagccgaaggtcatctggctggcctggatgttcttctccaggagcgtctccgacacgttctccaggtctagggggggcgtgtccggtcgcagaatattagacgggcgatgcaacaggctagacttcttcgagaacgagtggttcagcatcgaaggcttctccattgccaagtcgctgtcggtgaaggatttactcagactggagcttttggtcttcttccgaggaacggacttgactccggctgatgatgacctcttaattggcttcacctttgaaatggccaaacgaatcttaggcgtccccttcttcttgacctcgttctcttgctcagccggttcttcaggctcctcttccatcatgttcttgaggttgtcgaagtcttgctccgtgtcgcgcgtcgggccgtcgatgtcaccgtacttctcagggttgaccatgtagtcctcgatctgcgcgacagcctccttgaaggcagcggtcttgcacgacttgatcagctgctccttgaactcctggtacggcttgatgttgttcgtctctatccaggcatagttgttagtgccaaagaagtaaatgcattgaacattaatggccttcttaggaggcttgagttcagcagtgggcacagctacccggccgggccaggggctgaaacccttcattttagcccaaactaaatcaccaagtttatattcgatagacatgatacacgggtacttctcacagaaatctacgacgaactaaaattgaaacgaagcgcaaagcaagcaaaaaatttcgtctggccgcgtcgtccgtcgtctctcaaat

SEQ ID NO: 1310 - DNA, 2075 bp, Plutella xylostella
ttcgctcctcaaaaattataacaaaataaatatgtacatattttttcttcaattacaaaccaatcaaaatcttgtcacaatacaaacaagaaccactctataactaatggtgaaatgcaccaaacatttaaatgaaattgaatgtatggctctcttactctgacattataggtactgtcaaagcaggacagcaatagatttaatttcattgaactatttggttcaattcaccctaagccctaatttcatcatactcggttaaatcataagcagggattagttgttggcttttgtcacatctgtcaagaatttaatatgaagatgacgtataattgatgaactaatcccttatgttatgatctaaccaagtatgatgaaactggggcttagattacaaaatacactatcgcaacaaatatacttaatataatattatttttgttgcaatatagactaaatcatctcctataactgagataacatggtgcactatcgctcgatcatcctcagccgcagtggaccgtcaggtgcgtacatgaaggtgacggcatactccagcggctcgtggtggtactccaggcgatacttgcggagcaacttagccaacagcacctgtatctccatatcagcgaaccgccgccccagacagatcctggcgccgtggccgtagggcagtgaggcgaaaggatgcagccgcccgcccgcccccagccagcgctccgggctgaactcggcggggtctgacacgaactctggcatgttgcccgtgactattgtggggaagactacttgcactcctttagggatgtgatagccgcaaatgacatcgtcctcttgaagagtacgaccattgccgattaccgttgagtacattctgaaaacttctctgacaaaagccttggtatagtgcagcttgtccaagtcggcataggtgattggtttgtcagggtcgggaagcactctttttatctcttccgccattttctcttgttgcttcgtccttatagcagcctggtacaggatcgagcacactgccattgatatcgtatcaatcccgacaagtatgagatcgagggccatgatggtggcaatcttcggatctccctcgctccgcaacacccgctctagaagagacaggtcgttctctgacgtcaccttcttagtcttcagtcgctctaaggcttcgtttatgtagcgagagcagagttcgacaaagaagttcatattgttaacgtatttggtccacagcggggtgggtatataccgccagtacggcgccttcagttctagcacggcaacgttcctcaacgcatacttggccgcgtcgataatgcgctggggctcagggttcgaagacaggtctgaagacaggcatcctagccgcacgtctagcgccacgcggccgatgcactccaaagaccagcgatgtatatcattatcgaagcaggcgggcaggtccaggttctcgtctcgagccgtctccatgtagctgatgaagtcgctggtgacctgctcgatgggggccacgtacttcctgactgtctgcggctgcaggatcggccgttgcaccttggagcggaacgtgcgccattgctcgccgtggacaccgaccactcccggcaaatcaccgaagaagtccttcctgacttccgacttgtacttgacgaggcacggcatcgacggccggaacggcgtgggcccctcccgccggtagatcctctcgatctcatccgcatcatacacaaacagcagatccggccgtccgatcagccctcccaaccggacaatccggccgtacttatccaggaacaacttggtcactttcgcgaactccgatatatcgtactgtccgatgatgggcaccattcgccaggtgttgccgaggatcgggatgggtcggggtccagggacttcggagtaggggcgcgcgttggtgaagatctcctctgtgaggtcagcggcgggggcgacctgggagcgctgccgggcagcgaaggggcaggacgaggcggcccgcagctggcagtagagcggcgtgaggcgtgtcatggcgccggcggtggctgttcaacaac

SEQ ID NO: 1311 - DNA, 1807 bp, Plutella xylostella
ccaacaattatttacaacttcttaggtattatttattactatgtacataaaaactatgtaggtgcattatatgctagatatttgtttatatgtgattttacggcatgtccacagggtccgtcacgattattgttacgcagtaacgatactgaaccttaaaatgttggttggtttactgaaaatataaaatttacaacaatatgatttaaacaaaatacataaacatattgttatatatatatagctggtggatgaatatcaattcatacatgaaataagctattgagatgtctggaaagtctatcccattttaaacattcactgatatataggatctctataaaaatcctcggatcagaaaacagctattttaatagaaaaaaaaagccattttaatttatgcgtacaattgcatttgtctctttccttcactatacaaccctcaacttgctcttacttatatttaaacattcgaacattacagccttattataaccacatcccaatctacaccccacacaaacctcaaacttcaccacttaatattaagcgctatatcgctcttctcgaccgcatggtaggtggtatgcaacatggcccgagccttgtctgaatcttctccgtcgagccagtcggcgtacagccgccggagcagccggttgtgtgctggagatgctagtgggagtgaggagtatagggattcgagacgggcgacgaggtcgcgcccgctctcgccggagactgggcgggtttgggcaccgccgtttaggcaaccagcagggcacgccatgacctcgacgtagtggtagggcgacttgcccctcttcagcttctgcaccaggttctgaatgttgcggaacccgttggcgactccgaagcgcagcacctccgcgccgccgcgctccagcgtcgcctcgcggaagtcggggttccttaaattcttataaaccaacggcgcatcactctccccatacagctgttcagccacatacaggaagatctggtcagcgtagccgccggagcccgacccgaggtgccgccgcaaccccgggccctgcgggggcgcgggggcaggagggggcgaggggggcgcgccccacggccagtccaggggtacactgtcgacgtcggcgaggggcttcgagttggcttctagcatttgttctagctcgatagcagtaataacgcagtcgacatcgtgacagctcagcagatcattatagaagtcttctctcgaggcttccagcttcttatcatagcacggcatgaaagtcacgtggtatatctctgcagggttcagttgtctgtcccgcgcgagcacttgtttcacgagggaacccatgatctgttgtggcgactttgtcgtggatatgtatgggaggatgaagttgccgtgggttttttctgcgtagcacacccagcccggacaggagctggcgagcatgggcagcgcgcgcgcggcggggtcggcctgctgctcgcgtagtctccgcatgaactcgcgctgcgcctccatcactgagagatcctccgctatggtcatgtctagcactaggtccgcgcccagggactttaggtaacctactagtttactggtagtttcttcaggactcagattatacctcgctgcgagggacagagtgggctgcggggacagggagaccaccaccagactcacatcgcgagtcacacccttactgtctgtgtacttgcgctccgagaataccctgagtagttcctcctggctctgcctcgtgaccagcacgctctcggcggaggtgatgcagccgctgcacgcgaggcagtc

SEQ ID NO: 1312 - DNA, 2261 bp, Plutella xylostella
cttttggtcaatcaattttgttttgtagttttttttcttattttctcctcttactcaaaacataaacaaatctaaacgaataaatattaaatatgaggtgctgtgctaaattaaactacttaccgttgagtagatcatattctactgtaactccggtaacaaacacatttctagaagaggtgaaaaagaactttatccccacaaacactttgcagaagacgttattatcgtgtggttcggctgctattgccctgctcaatccgtatagaggagacatgatagcatgtttaggagaaataactggcgacgattctttgaaatacatgcgttcaagaatgcttgaaacacctgaaggtacagatatattaaaagaaaagcctcggatcaattcgcagtctgtatcattttctacactatctaatatgccaaaaaatactttgggtcgagtttatgcagactttatgtgtgacaacaacattactgctgactctagattgcctgtgcaattcatatctgatccagagctagcatatgttatgcaacggtacagggaagttcatgacttggtccatgctactttgttcatgaaaacttcaatgctcggagaggttactgtaaaatgggttgaaggaatacagaccaagttaccgatgtgtataagtggtggcatctggggagcagcaagactgcagcccaagcaccgccaactgtacctcaagtactacttgccttgggccatcagaactggagctaatgcacaatttttacaaggtatttattttgaaaagagatgggatcaagatattgatgaatttcacaaagagatgaacataacaagactagttaaaagttaatcataaattattaaaaaaggagaacctagtatttaaatttatttagtgtatagggacaaaatattatacctaattatgttactataaaataaaagtgcagaaatgacttagataatttgttttgtttttgttttaatattcaggggtcacttggtcagtaggtataccataccatttcagtgtaactgtacccttccccacactgaaatgttcacaagacataatacagaaactttaccagataataacagcaacaaaatatttcttactgcagtaaaaatattttataaatattttgcaattccagggtatcctgttcaaatatcacaaaaatcaaaacctcttatacatatatttatcacttatctctaatcataacgagatgacaaaacaaattacaacttattcctaactagcaagcctgactattgatggactgtgttgctgtacaataagtatattttaacaatacaatctcatttacagtacaagccacactgccaacctagctcacacaatcactagcaggtggtgtatcctgcgcttctgagactaaaaacagtcaagcaggtggatcctgtcatgtgtattgtttgtaacatttttgcagattttgaggatccacttgtagtataacgtgtagtgctcattgaaaatccacaaatcgcagaaatatataactagaggcatttagaatgaaagtgtttcgtttggtgcttcatgtgtcgtcctcgaggaagagaatggaggcgatgttttcacatatttctatgcacacttataaaatcattaattacaattataacaaaacactagttacagccaatcataagagcatctcggagctgcgtccgttggtgttgtgcagcggcgtggtgcgggcgccgacgcgcgccgtccactcgtaccacacgcgccgcgagtccacgcagcgccagaacgtcgccgtgatcgtgtcgcccttcgacacacgcaggggggtctggatcggtataaagacagggaaccacgatatcatgccggggctgtgcgtcgacggcacgatactgatcatctcgttgccgaacagcgaacagtcgaagtaccctccgaagccgtgcatgacgttgtcctgcgtgacctcccacgagaccgtggccgagcgacggttgtccgggagcggcaggtctctgtagtcacgtatttcttcaccctcgttgcttgttatgcctttggctgggtgctcgaatgtgaagacgggcttagtctctccaatatcgtgtttattctgcatataaaccacccagagtgtctccagattcttcctctgctgggtctgcccggccgggccggcgacggcgcgcgccgcggcccacaggcggggcgagctcacgggcgccgcgtacgacgtgtaggcgcacgggatgg

SEQ ID NO: 1313 - DNA, 639 bp, Plutella xylostella
actccagacgcgatcttcgctcctgcttcttgactagtagtaaacagagagaacgtctcgcatttaatctcttgttccgtgagttctccactcaagatataccggtccactataccaatggccgctgtatctgtttcttccaaactcgtcacgttttcttccttcagagcctttcttctcttagcaacaatgtctgaagacaagtcgtctactatcttgacgtagtattgttccttggctttagctcccaccaaatagtaaatgattaggatctggtaaaaccatcgcgtcatcttctggaaaatcagcgtgtacatattcggtgtttccttcacgacttcagcgagcctgtgcacggattgtgcatcattcttcgacagccccatcagtgttcggcaaaccatctgcgtagtagtctcaaccacatcctcgtaaacattgaaggtcttccccgggtccttggtggcgagcagacgcgccaggtgccccgcctcctcgttgaacacctcctggaagtgctggaccgagcgcttgttgtaggacggcgtggccagcttgcggtggaggcgccaggtcgggcctccagtcagaattccttctccgatgaagggcaccagaaactcgtagctcggccctttc

SEQ ID NO: 1314 - DNA, 1823 bp, Plutella xylostella
cgcaaagatgtacacattccacatcccgtacacgccagtgaagaacgctgaagtgtattccagctcaatattctcatcccatttccactgcccctcggctacttggcctagaatgaacccaatcacagtcagcgcggcgcacagcagtgtagccaacatgaggaacttgaagcggtagataatcccctcatagtgcaggcgacggaccgagcacattgttggcaaagtagccctcttgtgggagatgttcacaaacactttccacaccatgtagcacaggaacaagaagtagatgcaggtggagatgccggccagcactatgaaggtgagagccaggttggtgccgaggtcagttacccagatggagtagaatgggttgcggagttgcacgcctcgctcacacatgtcaaagatgaagagagaaatacatcccatggctacagcactcaagtggcgccagtactgcttgagggagctctgggcagtcgtgtcttgaatcagcatgtgttctccggcaaataccagccagaatgagaacagagtggcgtagaacactccctgccttatgtcacccaataacagcataaacggcaagtcaaactgcagagtcaagtactccaggggcatattgaggagacacaaagctattcccaaacttagaagcatcttttctaacagaacaggcttcctctccaacatgtgaactctattccagaaccacactatgatggcgacaatacacgggaaaaacacagtcttcaatgacacccacaccttagtgaaaccaccgttctggttaataacagtcagccacatgtcttgtatatggccgatgttggcattcatgcctggagcatcaaccggaagcctgacattcagtaaataatagtcgtggtacagcgaacctaactcaaacaaaggtatcgccgagcagttgtataagtactcttcggttttgatgtcgatgtcgcagtcgaggtgtcgcttctcgacggactgcgtgtagagcttccaggcgtcgtcggggtcgcccttgttgcggtaggcgaggcgcgcgtccacggtgatgatgctccgcggcttcacctccatctgtgagtggtaacggatgtccacttgcagcaccccgataaggttctgctgccagcgcgagtagtccagcgtcatgctttcgcgaggcaccggcatttggaacgcgaacactatatcgtgctccgtaaacagttggttgaagtccccgagatcgacggttttacacgcgcccttcccacgattgtagaaccatgtcgaggtgtcgttcttctccgtggcggtgtcccggcacaccgtgcctaggatgttctgcgcgttggccggcatcggggccaccagcccgccgatcaggaaacacgccacttgacacaacaaaagaaacgacacgagcacggctagcttacgcccgctcaggttctcgatgattgtgcccgtcattgcgcaagttgatcaaccgccgatcatttataagtttagaaaaactgatgtgaaaagaacacgattatatttccattgttcttgtttccgacgcgaaacgaagcctacgagagtgaacgaaacttgacgcgatcaatttgacgtttctgacatgcgcagtaaatccggttgccagcgtaggaacgaaacgagttttcgaactcgttacaaatatctcgttactactgtaactcgtttcgcataataaaataaaaacagtttttatcgtttatcaaacttaatttgaaattagttttaaatatgcatcgaagtaatgccaacacaactataactgtaattaacaatccaataca

SEQ ID NO: 1315 - DNA, 2121 bp, Plutella xylostella
gttggtcaggtccgtgtcgtcctgtgacccgacgtctactgctagtatgtgcttggcgccgagcgagcgcatcacgtccgcaggcacattattcgtgtagcatccgtccagtataagatggccatctataggatcgcaaattggcgggaaaatgccggcgatgctcatggaagcgcggacatacctccacaacgtaccatgccgatgcaccctcatgcagctctcggtaatgtccgtggtgacggtgaagtacgggatccacaggtcctcgatgtggacgtccgcgaacgtgccccggatggtggcgttgaagtggcgtccggagaacatggacgtggccgggtaggttaggtctaggagctgcttgccccattgcgtcattttctgcgaccactccctagccttctgcgtgacagtcgtgatgttgcggtccatgcaccacagcgcgcccatgaaggcgccgatgctgacgccgcccaccatgtctatggggataccggcttcctgaaccgccttgagcatgccgacatgcgcggcgcccctcgcgccgccgccgcccagcaccagccccacgctcgtgccggccagccagcgcgccagccgggagaagtcagaatggaccgagggttccgacatcaggaccttgctgtagagctcgctgatcctgtagctagtcttcctggtgaacatgcgcgtggggcagcgcacgtggtggtgctgggacacccaggacctcatgttgagccagtgcacggtgcctgaaggggcaggcccgttggcgcggtggagtaggaccagttctttctgggtgcggatggcgaggcgctcgatctctttctctatcttgccaatactgggttgtttgtcgcccagcgcgacgagtagtatgcagtcggcttgtctaatacatcgctgcgtccagtgcgtcagactcgggtcgcactggtacagtgccaccttgtgcttgtcctcctgctgcgccagccaggagctgagccggtactcgttgttggggtccatgatggtgagccccagcagcttgcggatcacgtctgatgtgaggcggaccgtcgggccaatagcacacagcgagtggtacagctcataagtgaacgccgtcagcggaacatcttcaccgaccggcaccaccgccactgtggagaagttgtgctgtgtcgagcgcgcctccagcgtggctgtgccgagacccacggtcggcttctgccaggaaccaaggatcctatggcccaacaaattgatcaacctcgtcacaacgacggggaagcgcagtttgatggcgttgaacagcccctcgggcagcttagctagttcagagtctcgcactgccatgactgttgtgctgcgccgggtttgtgtcaccatctccacgatgcccacgaggtcgcccttgccgtactcggcgagcagctccttcttgccgttggggtgcgtgatgacggagcgcaggcggccgctcagcacgatcagcgtggagcccgcctcctcgtcctgccggtataccgcgcgaccggattccaggaatacccagtccagcgcaaagtccacctggcgcacaaacggcgacagtctccgcaccacggtgttcgctatgtgcagcaccacgctcggccgctcgcgcatcatgctgtatacggcggtcttggagaggagccctatgcgggagaagtgcttcgctctgatggagaagaagctgggttcgccggttaggacggcgagcccgccttctacttcgcctgggtatgcagtgaacatgtgcacctcgccctcgccctcagccaccctctgggagaccaccagagcgcctgacagtaagtacactagggcaacgtccttatggctctcctccttcatgatataagtcccggcgggcaggtcgcgcacctgcacgacgcccttcagcagcttgtcgtcttccagacctagctccttgatgaacgcttctgtcgctatctggattagagcctgttcatccaagttctcattttggttgtgtctcttgaacgatccctccttcctctggaaagacgacgtcggctgcacgtctggttgctgaaagatacataaacaaactgtcaaatcaaaataataacacaatccatt

SEQ ID NO: 1316 - DNA, 2822 bp, Plutella xylostella
gtttgttgtgcaagacgcccttagttagaattcgtatgtcacaacgtcaattttaaacctattgtaaagtgtcaaaaacctctatgaatttgggggttggtgcgcagggcgtttgagtgcaagaagggggtacctaaaaatgtctgatcggggatgatattagccacttatcgttcgctacgtgagggggcgcttatcagccggcaagtcgagagaggcggacgactcccggcggaaggtcagtttgagcttctcatcttcctccagcaggtcatcctcgaccgagatggctcggctcatggcggtgtggccgagcgcgcgggacttccacgcctctagcctcatgatctcggccttcatttcagcggcttgttcctgcagctcgcgcactttctccgagtcgtcggagatgttgttccgaagctctccctcggtggccatcacctcgtgctttaatttatactccgacacttccgtttccagttcggctattctctgcgcatcttccatgcttcttatgttcgcttgcatagatgcgaatttggtcttgctctccaggtcgcagtacttgtgctggaactcccgctggcgcgcctgcagcgcccgctcccgctgcagcgccgcgtcgtgctcctcgcgcagctgccgcgtctcctcgtcctggcggcgcagctggttcgtcgacacctgcacttgagtctccagttccataaccttcagtctcagctccttcaactcagtcagcgcttccacctcccgtatcctagttgacatgagctcttcgtccagtttctgaacgtccccggagcggctttcccaggcccggagaagcttcttgggcgtcgccatgatgtctgaaaccacgtttgatgggacgggcgacggggccgcttcctgcctgtgctcctgcagatgtctctgccacgactccgacagttcagtgacgcgcgagcgaagatccttcagagacaggttggcctccgcctcgcgaagcttcaccgctatcagctcatcctgcaaatgcgccacattattatccacccgctgcctcctaaggctcttattctcgttctccaactccgtgatcctggcagtgagctcccgctcagccgcttccctttcagccgcatggagtctggccctcaccagctcgcgttgcaggcatcgcgccagctcctcgcccttgggaccgctggtgtcagcgccctctagtgacgactgccgtgagttgttctcagcaatagtcatctccagcgaccggatctcatcctgcgccaacgccagccgttgttgcgcgtcaatatgtgccttcctcagctgttggacctcccgtgcgagtgcaaacttgtcttcttccccctcagctctgtccacttgacctcggaccagacgctcggcgagggctgaggattccttctcaagtaattccactcgctgtttgagcaggcggttctcttgccggatgcaccgtaaaacagcaatgtcgccttgctccttagtcttgatcacagtgtattccttttccaatttcttcatcttcttaggattcactttgatggagtatgcgaggttcatgaaggcatccgggtcagcttcggctttcagaggcagctccttttgtatgtacttcaaaatgctctccatatccagagacaacagatcatccttgcccagcgtgagcagagcaagggccaccttgaacacgatctcgatgccctccgagaggaacacgtccatgatgcggcaggccagcggcagcgtcagggtcgtggtgaagagggtgaggaaccagctgctcgcgtatattgaggtgctgaagccctgagactggaaatgaatatgcaggtcgggcagcagttcttgcactaagttctccagttgaaacatgcagagacccagctctgccatgctcggcttgaacatgtcccgcattcgatgctgttgcattatctttaccagcacggcgaatgcttcttcttcgggcatctgcataagcagcagcccaacaatgaaccctgacccctggcagtagcccacctcccggtcgtgaagcgaatacgccttcatgacgttgaacagcgactcctggcccaaaccgtccttctccttgaagaactcgtgctcggggtaggtgcgagcgatgtcgcggcggatcaccttctcgcatgctgattttgccttaatatacgacgcatacagcttcttctcaggcgagcagtcgacccctgcgagcagctgccacacgatgccgcggaagtggtgcggcacgccctgcctcaccaggtcccgtatgaactggttgcggcgcttccactctgtctcccagttgctgaccagccggccccagagcacccacaggtcttcttctccgccggctgaactggtagtgcgagtttccgtttcatggctggagctggtagctgaggcgagcgatatctgcgaagtatcagagttcttgcggctatgtacggtcggcagcgaggggcacttggcgtccgcctcgatcagtctgttggcctcctccagtttggcgagtagcgcccgttcgggcgtcgggatctctgccgcttgcagcaccgggcaaccttttgataaatgataagttgaaattgctgtagctggctcaaacattaaatgatttcgatttcataaaacacagggaaataacgcttggtgggcaccgcttacttagttacatttactgataaggttaaacacacggtataacaagtaaaagaaaaggtgccgcccagctggcaaagaaaaatccgaaataatcgaaaaatttggcgatggcgaccacacacacgcacacaaataat

SEQ ID NO: 1317 - DNA, 1146 bp, Plutella xylostella
gtaggtacttatcctaatttaatatattttgtacctagtacctacctgcgtcgtcgcgtaggtaagtacacaatcgtcgtagtaaagtacaatagagaacaatttgtttttctcgaattgtttgttagccctgaaaagggctttttgttgtgcggtattagcgcactcaccgaccgtggctcgtgtgttcgtcgtccgagtgtagtcagtcgcccattgtgtgcgtgtgcgtgcgtatcgagtagatgatacaacagcgcaacaacaacaccaccaacggtgccgacgacatacggcgcgaacacgatggcgcacgttcgatggcttcgtgtagtcactgcggcggcggcggcaagcaacacaacaaaaaccgtcgtcggcttacttcttgccggcggcggaggacttcttagctgcgggcttcgccttgggagcggcagccttcttcggtttgggcgccttcggcttcttagtcggcggcttggcggtcttctttgccttgggtgcggcgcttttagcctttgagggtgtggcgattttcgccttcgcggcgggcttctttttagcggcggcggctttcttgtccttggtggcggccgcagacttgggcttagacggtgaagcggaggcggacttcttcttggcggcggcggaggacgcagcgacggccttcttggcgggcttcttagcggcggcagccttcttggccggtttggcggcgcctgctggcttcttggctgcggaagttttcgattcgagcttgaacgaaccggacgcacccttgcccttggtctggatcagcgcgccggactcgacggcgctcttcaggtactttctgatgaaaggcgcgagcttttcagcgtcgaccttgtaagatgcggcgatgtacttcttaatcgcctgcagagacgagccgctgcgctccttcaggtccttgatggccttgttgaccatctcggaggtcttcgggtgcgtgggcttcgctttcggcttcttggctgctgcggatgccttcggcttcttcgcgggggtggtgggcgcgggcgcgtcggatgcaacagcggtgtcagccatttcgattgagttgagttgattgaggtaacacgacgtaagtaagtaacaagtaaggagtgtagttcgtaaaac

SEQ ID NO: 1318 - DNA, 2118 bp, Plutella xylostella
ggtgcggggcggggggtgcggcgtgcggggcgaggggggcgtcctctttgctcctccacgtggctgtcactgggtcggggctggagctgccgaaggttagctcagtaggatcaacaggcacaaccaaactctcaaacgagcaagtgtcctctatgactgacacttcagtgtccatcatcggatttttcagttcttccaaaggcttcaccctgaacggattcctagtccgaggactgggctccagaattgggctcctagtgatcttgacagggctgttttctggagaattctctttctgtgagctggataatgtctcaaacccactgtcgggttgagagtccgggatttcagaacattgagtgtcaatttcaaacactttattttctagtttcttctctggagactcttcaatgcaaacacttattggactactgctggctgtgttactacagctggagggaggactgaagaacttggattcaactatattgtcatctagaactgtccgtggaaacctacttagcttctttaacacttgactgtttgccgatttcatacatttagcaaaggacctttccttgttctctagtataggagatttctccttcagtcttggtgggtctaggtcttgggtattgtcttcgagcatggctttatcgtgagggttcacttcttcttgcgagtctaggctttgggtgttcttggtgtcttcaaacttctgcttcttggatttcggttctacgcagtacatgctgcttaaagtttctattgaaaggctctcatcctgagtctcagcgacatacttgggcaccatattgaccactttcttccgtgctctagtcttcggaacggctatgatgggctcgggtttcttctcccgcttggcccagggtctatcctcagtcaggtagacgctgaatccagggtcccatatgctggcgtgtgaggcgggcttttgagcccagctgtcggtttttatgctgttgttagtggtcctccggtcggggtgccagtcgtcgacagtgcgcagtgagaaggggtcgaggttgccgagcgccagctggaacgccacgtccggggctaggagttcacccgcgttgcagcatagcgccttctctgtgtcttcatcatctgtctcagtgagcctcctcatcgccctctccagtggatcatacacatactggtgcttgaacgtggcctccgcctgcaggaaggcggcgcggtactcgtcggtcaccgtcagggaggacttgttgaagaaggaggggagtttcttgagcgcattagcgaaattagagtcttgtgtggcgacgacaaactgcctcgccttggccagcccgatgccgggcagcgacgccaggtagtcgcaccccgacattatgcacatctgacggaacctgtcgaacgagtatctctcgatggggcagcgcatgacgagcggcagccgcgacgtgtccacgagggtgccattgccatctaggtccatcttgaatagcaccttagtacacccaaacagtatcagatccgagtcctcagtgatcaccagctgggccacattcttgacattcaggtaggcgagctgcgagtcggcctcgtacggggccacaatacagtccacgttgcggcgccgacactccttgatgaggctgagcgccatcgcgtgtgtgatgtccacgccgcgacgcatgaacgagcgggcttcatctatctggccaagactcaatagttctgcagctctcttcttagatatatctctggactctctccttttagcttcagtcatggctttggccggcagatgtcttccatcaaacaccagtataggcttaatattcttggagagcagcatcgtcacatacttcaagcagtacttgatatgtatatctgtttcttctcctcgcactattttatcggcacaggcgaaggctcccttgtggagccagcagtatgaatctatggccacagtacaaccactgaactcgtcaacattggctcgtcttgatgccttctccaggaagggaatcaaacctgtaatacccatggtaaatccctacaaaaacttcatgtatgactgaatttcaagtactgatagaagatgttgaagttatctttagctat

SEQ ID NO: 1319 - DNA, 3375 bp, Plutella xylostella
atcagctttcatatagatgatgatacaaaattaatgcataattttcccacaagtgagatcattactcaaaccacaaacattatacaattcagacctattcatttatgtacttaataaacactaggtttagagtaggcaccagtaaacaggaccacttcattaactttatccacaatcatgtataagaagggcttttgagctacaaactgttctggcatcaatcgtgaagagaatccagcttcagacactgcgctggccacagtgccctcctctgtcacttcaatattagccttctgcagtaaagtggacacatacagtgcctgatcagatatgagagggaaactggcttgttcatcaaacatatgcgtgaggcccatatcttgcagtaactccactaaaaagtccaagttagattcgattttaaacctcggcagttgcaccatcacagtccttgctggtttcttttcatagaggtggaataccgactgcaagttgatcaagttaagggcttcaatcacttggactagaggcacgtctgtgtacggcagaaacacgagcatcgagaattttccgccggcatacggcagttctagaaccttcgcctggattttatctatctgtgcaacgttgaactctccagttataaacattaggttgacgtccccggccgctcctccgaactcgtcgtagaaagtgctgacctccgtatccgctgtggagaatggaacagtccatttgcctttgaagtatatcgtgtctaggagcagaagactcttgccgtccaaatcttctggcgatgttatttcttccaccgctccgtgggtcgcatgactgacgtaggagtttatagcagaagccgcgtcttctgccgcagcgaactgcgtcgtcaggactttgcagacaccggccgcatcaatccggcttttgaaagccttcttgacagaaaacccttcgtctataaccacagctccgcctctttcgagaatcgtttcaccttgactctcaacgactccccttaaaatctcgtagtatttgctgttgaagcactttcttggatgtagccgtagcgctctcttcagttgaacgagggtttctgagtcagctccttcagaaacagctgccagaagggtccacaaagacagtggcgacatcacgaagtggttttctgagtcaatggccactctggtcgtcagttctgttgcgaagtcgtagatagccctccgaaggcctggttttgccttttcgactgaacattgtgatgctgctagtggtattatagctaacagagacagaaacacaactgtgtaagtagccatttgtactgcacagcgcaaaaaggatgttggaactgatagtcgaaattctcgattttagtcgggagggttttatcagcattgttcggctcccagtgagagatagtatagtgttgaggtcacacagtatttggcccgttttcagatagtgacaggttaccataacagacgtaaaattggtcagttcacctaagtataaaacaatattgataagaatgcaagacgtgttttgcattttagtaggtataagtacataattaaactatgaataaacctagtattttacgtacctgtagatggtgctatctttttgcactctgagttaacatgtatgccaaatgttaacatgtatcccagccggaaatcgaagtggagacttctgggatccaactacactactcactcacatggctttatacgatagctgctcaatggcgattagataactaaacgtaggtacctaattaggcaccaacctacccaaatattttaccaaaatgaatcaacaccacaaaatatcgtcatttacctactatgcaacatcctttataagctgtagatcctgatacatcctcacagttggcttctgttagtgaactagtgcagttatcatatacttagtgaaaaccattatgtggttcaaatcctttacatggtttgcggcaatggctatggttgtgggaaagcaagtgccatgcaaccatgaaaacgccctgttgctatcgaaaggaccatcctaccgcttcgcaatggaggttcttcatgccatggacttcgaaaatgatggccactttgtcttctcacctctggcttcatggctacagctgatgaatgtgttggaaggagcttcaggctacactcataaagaaatcctcaaagcaacaggacaccacccaaatatatgctatagacggaagcgaagagaggtcttgaatggcttacttggtaatgcaagcagaaccgattacaagatgaacagtttgatcattgtagatgagctgcttggcgtcagaaaggagtttaaggaagaagtcacgaaaactacgaccctagatgtgcttgctttggactttgtgcatccaaacgcgtcagccaaaatagctaatcaactcatagagaagaaaactgggagcattttcaaagacatggtttttgaagacgatttcgaagacacttacttcctgacgtatgactttgctaactaccagagcgcgtggatgcagtctttcgaccctttaaagactaagatggaggtgttctacggaccagatggcaaagcccttggatatgtcagaatgatgaacacagtgggtccgttctacaccgccagccttccccagcttaacttgaatatcttagagctaccaagtgacaagagcaaccaagtttccatgctggtgttcctaccacaacacccaagtcccgattccgtgtttgccaacctgaacaagacgactatggctggaatcttcaacagtttaaagaaggaagcaccgaaaacggttgctgttagcttgcctaaattcgagatagaaacctggagcagtaccaatgagatgatgttcgatatgggcatgaaatccatgttctacttagacaatgctcaactgggtggtatcagcaacttcaagatcaacgtttccatgatgcttcagttcgcagctattgaagtcacagagggtggagtgaaagctgcgagtgtgaccgctgggcgtggtaagagggacttggttcagttcaaagcgaaccatccgttcgggtttgcgattgtggataagaagacggagttcattctgtttgctgggatgtactccgggcctcgcagggctgatcggctggatgaaactgattaatgcaaataggtagataggtatctggtaagcccttaaggaactttggccctcagcgtctccctaagtagttgcaatctttattgcatctttgttaagtactcgtatatttaaatttggattacgagttaatctgatttgccgtctcctacggaagtaccactcttaaatctatgcctgttaacctcaagatatagacatttgaaagggat

SEQ ID NO: 1320 - DNA, 3366 bp, Plutella xylostella
gtcttatttaacgttagcctacacgcaattaatattcagaatattcctgtacatttcaaaataaattttgagtggtccgatgagctgaaaaaattacactatttgtagagattgaacgaagtcatggttccaatgtcggtatctaaacgtacgaataatcacggcatcgggtaatatcatatcactgtaaattcttaaacatttattaaagtataaagataagaaaacttttacaaacttaaatatttcctatttatacttattatgtacttacttaatgagtgccaaaaaatataaatcttaactattttctcgatgtacctaactagcgagctctcttcttgccaaataatgttttaattcaaatacaatgaactaggttttacgaatctgaatgaaagcaatatgatagtacctacattacgaagaatttataaataataattacattacattgttatattgtgactgtctgtatattgtatatataagtaacataaataatatgttttttttaatatataacgtaccgaacatctatcgaccacactttcaaaagtagacatccaatatgtgggtatgtatgctgtaagtatatgaaatacttacttacatacattacaagttaattatgtacttggccctttattttgcattagacatagatctagaaattgaaattatataagtatttggcatttatacctacttcaaaattgaaaaatcatattaccgaaaattcacacacttaacagctactccacatgtaaactatattatgtatttataaataaatggttgagtacctagataggtacttctgtattcataaatagacttacataagtagatacttttggcatcatctaatttggtcataactgttaattactcgtagctgtcaatacagtataatttatttttatcatcaaggtatttagttaagtatataaaaatgcttcttcctgagtaactaagtactcatgtcgtgtattgtatataaacactatttactttaggaaattgtacattggccgctaaaggcgtctatttattaacttagatgtaagttatagctcattatcttgtcattttaatgtaacattttagtttattcgagtactaggtacttaagttttatctgtacaaattattaattatatatgttgaataaagacgtgttttcattaaaaagttcatattgttagactttctacattcatattttcttagtctgcctgctagtatcaataattaaataacataaaagttttttggccatttcttcctgatataggtacctacttatatcataatctgataacatctgaagctgaagtaaaacgtcataggtacctattagtattcttttctaatctagctcataatcttataaataactaattacacatctacttaaaacataagtacatttacaagttaaatttaattatttataaatactattcttatgaacatcgtgactccaacatatcttttctgcatatcgctataaatattaaaccatattaaactgcctgaaaagttacacatacgacgttagccaattaattacgaactaaataaagcaatttttttaaaggagtagttacatacatatatcaaaatatattatgctattgggtccagagtgtagcaaaatatgctatttagcgtaacacgtgatggtgtgggtgtacattttacaaaacctatgaatgtgtactaatatcatcatcatactgtagataactttgtaccagatcccaaacaaacggaacaacagtagcgccatctaaccgtcacattcaaactagtaggtgagtgagtatttgactgaattcactggtggtctcacaatctacgcgattcacagagtctcagacaggtggagctattccaatttttccatagcattgaggagttcctccatctcttggtggattcctttgagcaggaccttcatttgccgaggggagtccaggatgtcgatgctctgggtgtatgggttgtagcgcacgctgaagtcccgagggatggtgtgggagaacttaatcatcttgtccttagcatcttcaaacgaattggccacgaagtacacgggttggtactcagtgatcgggtacttctggaccccggtctgttcgggctcgaagtcccggagctcaggtttgtccgacagactgtactgaagctccccgaacgaagacaggagaccagccccgaaagccttcagctgtccgtcttgccggcacagaccgaactccacggtgaaccagaagcacgtagccagtttctcaatgtaatcatcaggtgctccgagcgaggccagtcctatctcctgcgagaactgcgcaaaggcgggatcggcaaacagcggggcgtggcctagcaactcgtggcagacgtctggctccggagtgtagaagggcctggagtggtggcggatgtactgggtgctgtggaacacccggaatgccaggccggcgaggaagtcgcgcgatgatagcagaccggccactgggcgcagggtgaagcctgtgcaatctttcaggaaattagagacatcttccaactgcggaatgttatcagcccggtagccgcagttctcaatgagcaactggaacacatgattgtgttctcggcacgcgtgtgtcggataaagttccgtcaacttttcaaagatggcgccccaagtggcgacctcctccttgctgtaattcacatgcgggagaggctgtccgtggcggtagttgtaggcaatgtcggcgaagtacttcctcctggcacggtactcggggtccgtgaagccagggtggtcggagtccagctcggacccgtacgacaggatctggttcgcgaaacggtccaagtcacggatacgccgcgggaaccacgggaccgcggatcggttatccttgtaattcctcgaaataatgttcaagtagccgacgtccttcttcaagtcagccagagcggcaccgaagtccccgatcccgtgttcacactcaaccatgaactcgtagcctggtctcctagctgaggatcgggactcgatgtggctgaggttgactccgtgaccggagaagatgcccaggaacctggccaggtctcctgcagcgtcagggctggctggggagaatagcagccacgtcgacttggacgagtcgcgaccctcgcgaatgtagttgccgccctccattaatttcggcttgtcagggggtgagcttgaaagctccacaggtttgttgacttccatcatggtatgtactcaaatagtataaacaattaaaaaaatagtctaaaatatagtttaatctacgaccgatgtgcttttgttcacgtcttgaaacaaatgaacgtgat

SEQ ID NO: 1321 - DNA, 1197 bp, Plutella xylostella
cggccattgcttgacaatggggaagaaaaccaagtgaagctttggcagcacaatcgagtgtgcctttcagattctgaccaattgcattattggggattaaaaatggcgattgcaccagggaatcaggcacacttgcctaaggcgccatctgtcatcatccattagcttttagttttcctgcccattctcattagttcgttcgtcgattgagtcaccctccagtctcactaacagcaacaaacagacacttggcggaccatcaaagtgtccgaattgtcctctgctaaattttgttcttttcggttagtctcaaatgttcacaaaactttcactgaccaaaaattacaccacttatattttctaatagacctttctaccagagatttgttttgcagctatgatatgaaagatatccgtggaacgacccagggaatatgattggtggatatcaaacacatccatagcatagcacatatctagtggaaaagcacccttaaaatacaatcttgtttcaacagtttttctgcacatacttatgtaatctcacttgtttgtaagatctcacggtaataataataatataataactttaatttaaatatacatttactgtgtaggcttctgacagacgaagaacactgaatcgtattcgtgttgcagcatggagttggggttttgtgcgtatttcgtcttcactcctgtcttttccttcagaataataaatccgacatctttgatgatgtctagcagaatgtcgtatggcggctctatgctgtcttctgtcgtgagatcactgtagtgatacaacagagggcccaggttgacccacacgccgcccggccgcaggatcttgtagatgttctctatgaactctatcacattgggagcgcagtctatgaagaaacacgtggccacgcagtgccattcgtccgcttctgtgtataccttcaggaagtccccggcggccatagacaagttatgctcgtgcgcgtcggaggcgggcagcacgtcgggcacgcgcgcgcccaacacctggtggtggcacgtgaggttgttcacgtactggtggagccacgggtggattgtgtatttgttcacctcagtggtcctattcagcaccagattgctggcaaacagcatgaacagtgagaactcgttgccctgacacgtgtagcctcgcgccgccacctcccacgc

SEQ ID NO: 1322 - DNA, 850 bp, Plutella xylostella
acaccatcgctcggggatgaaagctttcggtcttccccattctttgtcgcatttgctcgtcactccgtgggcaagcactatgtctaccccagccggcacgacatagtccgccaccacaaactcctcgcgactcctcctgactacccctccggtggccgggtgcagtctcagcgcctcccgcgccaccccggccagataggggaggtcggggcagccagcgccggcgctccgtgaggccgccgcccaagacacctcgtcgtgagctcgctgttgttgggcggcgtggagggataggtggtagagcatgcctagtgctgattgggctagcggatccactccagccagcatcatgtcagcagcgaccgggaggagcctgttcttcagcggccgaagtttgtcgaggaggctcttttcaggcgctaactcgccggagtcaattccttctagtccttgtttcaggaaatgttccattaagctaaaatgagtatcaaatgcctttaacgcctcattaaacgtatccgtgtcggggcgcagcgtgagttcgctccgcacgaggcagccggctgacgcgacgtcgcggctggcgcggacgaggcgctccgccgcggtcagcccggacagggagcgcttcgtgagcgaacactgggtgggcggggcgtacctacgtgtgatatgtagcgcacgcatcgcatcaaaggtaccagttttctactatgcatccactgtatcggagcaaagaaagcgtacgataccgataagttgacgccattttttgatctgaggtggacgcgcttacttattcttaattgctataggtacatataatttgttaagaacctaccgagttcct

SEQ ID NO: 1323 - DNA, 4179 bp, Plutella xylostella
ggcgagcattcatgcaatcagcacgtagtgttacggggacaccagcgaacctttagaacacagcgttgcgtaacatgctcgctgaaaattttacattacagtccgtaacgttggtcagtacctttagaaactaatagaacgcatacaaattccagtgactttcctatcgaatccgtatcgagtgtcgacaacactggtgatcgactaatgtccgtggtgatgtggtctatgtcgggtagttgatgaggagttcagggcgcgcgcgcgaggaccgccgtcatggcagctcggccacgcggttgcgcctcgcagactcgcgagacgcactgtgcacctcggccgtgcgcagggtgatgccgaagatgtcttcgtggtagcggttctcttccttcaacatatacatgatgttttgtgcttgttcgtcagtcatttctccgtactttttgataatgccctttaatttctggtgaacatcttcagccatcttacagtcaccgcagacgtagaagtgtgcgcctttgtttagtaacaaatcgtgaatgtcagaccctactgtctcggccaattcttggacatacatcttcgggacacctttttctctggacaaggctaggaacactttagaaagaactccgtctttcttggcttgttccttttcttcgcggtacaggtccatggtcctggtcctacaaccgaagaagagccaaactggacctgcattggcccggttccgaggggagatcatcgctctacggtgatgccaaaatcctcggaaaggtgcgatccctgtgccaggacctattaggatcagtggcactgctgggtcttgtggtaggtggaagttaggggcacttctgatgaagaggtaaacttcgtctccaggcttacgatccatcaaatagtttgagcaaacaccataatgaaggggaccaacgccatcttgagttttgtaagagactacagcaacggtcagatgcaatctcttgggatgagcaagtggtgatgatgaaatggagtagaatctgggctgcagtggggagagcagggcagccagtagggacccactcggcctggcagaaggaaactgttccaaaacttctagaagggtcggaaagttgtacagacgccaatcttcataagctgcggggtcattagccagaagattcagttgtcgcctttgctcatcgttttcgcatgttgttgctaaatactgcagtaggatggtagtcggcggcgtcgtaatgtcaaggaatcgcgtgaatagatctctgacgctcacagccggcaatctctcatgtggctcccaagatttgactggtccactggaagtatgagtctccttcatcaactgcagctgcaggggctcgtcgtagtcatcgacgtccttgagccgccccagcagtccttccaccagctcctgccggttgcacgccagcatgcccacgtggtcgccggggtcgtacttgatgctttccttcggctccaaatcaatgaagatagtagacctctcagcggactcgtcgcccaagtccttgttggctctgacgatgcagctcaccagctgccggttgactgccgactggagcgccacgggcagggtcggcgggcaggactccgggtccgagaacctgaccgtctcctcgctcagggccaccgtgccgagcgcgcgcttcgcctcttggagggtctcgtcgtcgtcgaggcagaatgtttcacaggcaacgttaaaaacgcctgaggcccacttccggaaggcctggtcctgtccgcacatctcatctcccgtcgccaagtcgtggatcctctcgcccccgaggtcaccgagcagcttgtccacatacttgccgaagttgcagaagttggggtaagcgctggagccgagagcgaagaccgcgaagcgcacgttggagagaggaccgaagctgtcgatcgaagcggtctccgtcccgcttcctttcaaagattctaatcggctcaattgcttgggattagtaacggtgtacttctggaattccatttggctgttcgctttgatgaaagatttaggggttgccaattgagagttcgcagcactttcgttgcctacatgatcagcgtacaaaatctcgcagagatgatctccgaaagcaactccattctcggggggatccccgtttccgaaagtggaagtgacgacgagcaacagggcctcgtgttctatcgatgttatatcgtagtccgccatgcagtggacctgagcattgaaagcatggccaaatatgacgcctagttctttggcatactgttcagatttgcctgtctcggtggcgtacagaactgtggctttaattcgcttggagagggcgcgaccgaagagtttggaggtaaatttgacagctcgagctatctgcttgaagtggaacttcctgtttatgggtctcttgccggtgatgggcttcgacttctgccattggtgcgtcttccaggcaggctcctgatactcgtatgctggcctcaaatagtacaacgccatctcctggtggaacaccggagtgatggatgacgacatcggaggcacgatccatatccagtccgcggggcagccagatctcagtcggttctcattgtccaggtgcttgatgaagctctccgcggcggtgtggtggtccacgatggtggcgttgtgctgctggaagctgtgcagcacggccacgttcacctccaccaaagccttgtcacgccatagagtcactggcgtacgggtgtctaggcccatgagttgggccactttctccaacatattcaatcggttggtatcgcagaagttccgacagccgatctcggtgctcatgtaccagccgttgaaggcgttggccgtgaactcgatgcctccgcagtcgaacctcatgccggagacggcgggcagagcgtaccagcgcagctgcaggtcctcgaaccactcgtagttggggtgcgtcatcgggatctccatgacgagttcccgtgggatctcgaagtagtccgggtccttcccgttggcggagagcaccagcgggagcacgtcccacgccgtgcgcggcgccttccacccgagcttgatgcatagctcagtgaactcgcagtgcatggggtcccccagcacgctgccgtccggctgccggtagccggcgtagctgatcagctggctgttccagatgcggtagtcgtggctgcagtccgtgcgctgcgggaacaccgtgatcgctgatctgatgttgcccttgttggtgctgtacttgatgtggttgcagagagcctcgaacatgccgctcgtggtggtcacctgccggcagtcgaacacctggagcttcgaccactgtatcctgccgatgcagcgcgaggcgttcctccaggccagcttggctccgaacaccagctcggttgtggtgagctggtaggtccccgtgctggcgacttcttcctggaccgtcttccatcgggcctcgtgcgcgggggtgttggctctccgtatagaagcgaagtactgtccgaagaagtccttagcgtcgctcagcacctcgtccctctcccgcgccacgtccccgcggcccgggatcgccatcacgctgcccaggcatgtccgctcgttgcacaggttcggcactcgcggacaggtagaatcgtacaaacgatcgtatagataattgtgcgattctaaattcttcaacacttttgggcgtgtaactttgcgcactggtttcttagcgggttctttctttgcgatcacaactgctttatcttcttctatattttttactgctatagttttcgtagaatctccattaatcgtgggtttctgttcatcagttccatttaatttagaataatcttttgcaacagccaatgatgcttccttataatgctgtacatatgaactatcttttttaacatcgccatttgtgtccactttcccatttagtgaaggactgcatactgtgtcattatttgtggcattagattctttcaaaactatcgaaaatgatccgatgtcgtgatcgatagggcacgattttatttgtatttcctccactatcagctctgaatcgatcatttctacggaattatcgattaccgtttcggttatttgaataccgggaggcatttttatgaagaaaaaactgatgatgttttttttctaattaaattatgcgcacgcgcggc

SEQ ID NO: 1324 - DNA, 914 bp, Plutella xylostella
agttactacaactatcaaaatatttacaggtttcaagtaagtataaattcatttcacaacacaaaagtcgtaataatttaaaaaagtatgcgaaatggggtgagaaaacgaggaacagtgagtaaagcggaactggggtaaagttctcatagcaatgtcaactatacagagtggccctgtaagtagtggttcaattgtaacagggtgatagagcacatcatcactagtcattaattacagtagagtttgctcataataatgccagaaaaaaaagttttgacacctttgtgaaaacttaagcaaaaacgttactactacccatcacccagtctcatttggatcatgaatggcttacaggactacctgtaaatttaacagctactgctctttctagtattataagatggaaagatgctaggcatgccagggctcagacatgtctttcatcaatttcattattgagccgccaagcagtccgctttactccatgctcccctggtatctccggtcaagtcggcagtctagcagtagttgaggatctcattaggagcgcatggcttgttgcagcactcatcgaccaggccgaaaatgatgcgcttcccgcgcgcccagcggcccgctagcgctgcctgccggctgaaggaaacctcagggtctacggaccacttgtcttcgtctgagttggttataaagttgtccatattggatcgcttcctgggctcggagccgaagcacagcagttcccgggcctcggccaggcggcgtccgcagagcaccaccttgccgttgtcctgcgccgccgccgccaccgctagcagcagcatcaccgccgccgctttcatggtcgcctggtacttcaataatgagatgggagagaaattacaaatttagtatatcgtgttgttgttttgccg

SEQ ID NO: 1325 - DNA, 1449 bp, Plutella xylostella
caggcggcggcgggacagccccgcgggcagcgccacggccggcgcgcccgccaggttggccgcctgcgtgcagtagtcctgccgcgcgcactggtcgcggttgtgcagcgagcagaactcagagtacagcggagcgtctgagagagtggtcggcgtcagcaggatgtctactcctgtgtctttatcaaacactttggtgaagtcctctgatatcagtctgcgcagttttaatgccttcatgaagtacttctcgtagtttcgagctagtaagaaatagtttccggtgaatattctggatcgcactacattgttgaagccttgtgaccgagatgaagcgtaaagttcctctgttgagtagtctttgtctgtgcgcaggccgtactggagcccgtcgtaccgcgccatgttgctggccacctcacactggttcaggatggagtacactgcgatagatatggaagtgtgcggcatggatactgacctcacttgggccctttcattttcaagcaaatctgcaaccttcctccacgtgtctaccacctcctcactcataccctcacagtaatactcttttggtattcctattcttatattagatagatcaaagtcctcttttatagatactggcttgaattcttttttaatggttgttgaatccaaatcatcaggcccagcgatacagttgaggactacggcagcatcttccacagttctagtgaggatgccggggacatccatagagtttactagaggtatgagaccatatcgcgagaccagtccataggtgggcttgaggccgacgagcccgcagtaggcggcggggttgcgcgtggagccgccggtgtccgagcccagcgccgcggtcaccgcgcccgccgccaccgccgccgcgctgccgcccgagctgccgccggtgatcctccagtcctgctcgttgtagccccaggggttccgagtggggccgaatatggagtctacggtgccggagcccatggcgaactcgtcgaggttgcacttgccgagcaggcaggcgccggcgccgcgcagccgcgccaccgccgtggcgtcgtacgcgggccggaagccgcgcagcatgttggacccgcaggtcgtggggacgtctttggtgcagaagttgtccttcacccccacgctgatgccatccaaaggcttcattttcttgtccttgtaaagtctcttttcgctttccatgccatggttctcggctatttcctcagttacagtcacaaaagcgtttaaatgcttcgtctgcttagttttctctatacactgatctatgaagctagtgggtgttaataatttatcgcgatacgcctggtgaatttgttttattgttaaagatgataacttgttcatgtttccaggtttatttcaattttaaatcgtaaaaacttttactcatttgaggttatgtttacaaaattcact

SEQ ID NO: 1326 - DNA, 1493 bp, Plutella xylostella
gtgcaatgaaaaacttttatttttcataattaattttacgataaactttcacacctacctaactacaggcaggtttttaggtatatatttttttgtattttttatatgcattgttaacttaactaagtaaattaaaaataaactcatgttaaacatcacagaaaatcaatctgaatatttaaacacaacgtcgcagaatcatcggtagtccgtagtagaaagcgtgtagtcgtttgtcatcttgtcggtagtatattattggtatttgagcagtcgtggttctaggcgggcgcggcgggcggcgcggcggtggagttgctagtggctgtcgacgtcgagtcatctggctcgtcgatctggagccacggcatccgcttttgcagctcttgcctgtatctcggatgactgatggcgtacacccacggatctacgcaagcaactattttgcatgtcactgctggaatcatggtcactccaggggtcaacagctgttggtctccgtaggccccaatgagcgacatgacgccgtagggcgtccacgaggccacgaacaggaagcagacggtcagggccgccttggcgatgcgcacctccgccgactccgcgttcgcgttctggttagaccgcagggattctacgttcatcttcttcgcttgctctctcagcgctgcctcgtgggcaaacacctgcttcacgatcccggagtagaagtagatgatgaggctcatggggaacacgtagctacacgtgaagatgcagcccacgaacagcttcgtgtcgaacgtgttggtcagatagtcgaatgtgcatgaagttaggtagccctcaggaacatatcggccccaaatcttcaggaacggcaggaaagcccacggagtggcataaagccacactatgatgatcatgagtatgaccttcccccgcgacagtcgtccgtcaagcggccgagtgatggtggagtgtcggtcgtacgcgatgcacgcgttggtcatgccagcaccgatgccgctgtaggcacccatgagcgcgaagatctggcaacccagggtgccggtcgcgaacccgcgcatcgcgctgttgtagatgaagagaggcgctttcgccatcataatgaagtctagtatcgctagctgaaggatgaggaggttgcttgatgttcttaagctttttgttgtagaaaagatataaatgacgagtccgttcccgacgagcgcggcggccgtgaggaagatgtagagcagcgcgagcgcggtgtgcgcggcggcgggcggcgcctcgtactggaaccagtgctccggcaccatggccagctcctcgcccgacaggcccgcgcccagcatctccacgccctcgctcgctttgagcgcggcgaagaagggcccgaggccggagtcctcagtgcggttgtccatgctgctgccgagcagtcctcggtagtgcggccccccactgactgactgccgcagcggcctcccacgccctgcctttatacc

SEQ ID NO: 1327 - DNA, 601 bp, Plutella xylostella
ggcaacaccaaatatttcttttcgtatttcgacaagtcaaaatgaagatcggactctgcgcctacagtggatacaagatctatcctggccatggaaagaccatggttaaggtggacggaaagaatttcacattcttgaactccaaatgtgaagctgctcatttgatgaggaggaatccccgtaaagtgacatggactgtcctatacaggcgcaagttcaagaaggggcaggaggaggagcaggccaagaagcgaacccgcaggacacagaagtaccagcgcgccatcgtaggtgcctcgctcagtgacatcatggccaagaggaacatgaagcccgaggtcaggaaggcacagagggaacaggccatcaagcaagccaaggaacagaagaagagcacaaaggccagcaagaagaccacagctccccccaccaaggcgaaggccgcccccaaggccaaggctgctaaagtgagtcagaaggccgcccccagggttggaggaaagcgataaacctctacaataaatattggctaaggcatttgttgtgtttttattctacattaataatcttaaagtgtagtttagaatcgatttaatagacc

SEQ ID NO: 1328 - DNA, 650 bp, Plutella xylostella
ttcaccggcatcaccggcttcgggcccgccctggaattcctagaaatagacgtcttcctacactgcagcaccgctttgctctcctcaaactccagctcaaagtcctcctggttgaccctctcgttgccgtacgcgaagaacacatcctcgtcttcgaagaactgctgcagagaggttagaggagcccctgattgggtgaacaccttgcggacacagcccgtgtctagcttcacgcagtctgtgatggctgctaacgcgtgttctagcgttggactgttgcgcttgtttaggagcagccggcacaccttcctcggcttgacgccgttccggatgatggtgacgatgcgcgggcgaacggcgctgtcgcccgccgggctcacgcgcgccgtcccgttaccagtagtcgcactaccatttgtctgtaagtatcgggacagtctgtggttggccctggcgggtgagggactggctgcgtccagggactcgggtccgctcagtctgaatgattgcggtgtcacagcacttgcctcatagtccaaccgcttgaaaggttccccaaatcccccacaaacgtatgattgaccatcttccaggtcatctagttttcctatttttcgtccttccaaagagtatattgccctgactccact

SEQ ID NO: 1329 - DNA, 3124 bp, Plutella xylostella
ctccggtaataataacaaacagttaacaattattttgttaaatataattttactggatttataacataaggtatagtaatgaatgatacataatttatagtacaacaaataatactctggtttgacaataaaaaagtaaattctttaggttttttctaattcctattttcaagttttaacggattagtgagaagcacttattgatacttaaatattaattttttgaaccatgataattatccaaaataactctttttttccatcaatttatagtaaatttttatagtaaatttgttattttatcataaagacaataacacgaagtatgtagttcagcaaaccaactcacttagtccctacaaacatggccacccagcctgttcctgcattattcatggtcgtcttaaacactatcttaacataattgtcttcactaaaataatcagcaggcgtttctaaacagtacgtagaaatcacttgcccttttctattaacgagctgaacataattttgttcacagagcttacctaaatcaaacactgcaaagtgtagatgtaatgttgaacctactggagtctctagttcccattcgcaagtagctattctacggtaaacatctggatacatgggactggtgacttgtcctagaatactgtgtagcttgcccccacatcctggacctttgtccgtggtcatatagatcaagtcataagttaataagtctccctcgactccatggttatgaagcagcaaatgcctgccagttgaaaatactgacgtgttatcctcataatctgattgtatttttaagagtcttttgtcattggctttatctccatccagtatttcaaaatacacttggtcattccaataacttgtgctcactgtaagaagatacactgaaatggtgtgattttcaggagctgttattagggtgaagcattcccgcgattgcttgtcagacactatagtcggtattacagaaattcttccttgagtatcactaaagtttcttggacaataacttccgtaattgatttccagttccacgcctttatgattaatgttatctgattccggtgatgtttgcacactaattttaacatcccctgtaacataaagatctactgaagattttttcccacaaaaaacgaaagattccggcagattcagatctgcttggtacatcgagtagtagttactaaaaaattcatcacctcctcttcgtagcatgaaagttttacccagtgtgtcattgaagctgctgggcatagtggttataactagtttgtccttatcacaaacatttttatcctgtaacccttcttgcaaatccaaagatttgattctgatatgactggttaaatatagtgcttgaactgaataaactaaatacacacagtgctctcctcttggaattagtcctttatcaaatcctggagttttaatagtctggacggtactctgcagtcgataagatgattgcccacatgttggttcacggacactcactcgggcttcaaatcctgaactagaaacatccccatctgtatacaatcttaagctcataaagtttccagatgatgtcagctttggcggcagtgtatgaccacagtaaacaccaatgacaagactgtttgggtttaagccgtctcgtatttcaaccatgtcacaattgcatttactgtaccctagagcagtttgatttacatttttgcatggtgctatatggaattttgtaaattctaccatgataacacgattaggtggagcttttatatcccagtgacagttcaggaaattttcgtataaaaggttactgccaatcaatggtgattttataatttgagtgccttctgccatgacattaactagacctccacatcccgcttctttacttaaactaaataaaatgtctactttaaaacctgtgtagcttaaaccaaagtcacttaagaagttaagcaccattgcattaccatttcctttaataacggtcgtagaattaacatgaccacacatgagtgcagtacgtttagtttcatcaatgctccgaccattatagacagcaacaaaatctgtgctacaatcactactgtcttccaaatctatgaacaaaaattttagtaccacatctttatcctttggtgctgtaattaaccatgtgcagttaaggtttgattcatattgttcaccatcgtcatgcgatttaagtatagtgggagtagtaatgtgacctccacatgaaaatatttgatacgataatttaaatcctttcttttgaacgtatcgatcagatttaaactctaagattacttcatcagtaaatacgtcactgtttttatagaaattcgagccacaaaaggtatatatatacctgatagcttcattgcctgtactacctgttattgtcaagttatcatattcacattgaggatacggaccttctacttctaaatctaaatattttagaattattttttggcctggtgctgaaattttatagttgcaatctaaactagataaatattcaaatggatatcctgggctgtaaagaaacttttcctctgctgaagcattaaagttactaccacatataggtgtccacactgctttaaagccatccaagttaatatcagaatcagtcctcagtataattttcattcggttcccacttgagttataagcatgaggtaattctctcccgcataatttagctacttcaatgtatcgaccttcttgccagtcgtatataatgactgcatctttagtacaattaggtctttgctcaattacaaaacgttggacaaattgtagtgaaacacggcttccttgttcagccttaatttcccatacacattcctgattttctatataattctttggaaaattgggggactggaatgtgttttcatatttcgtcagcagtcctccgcactgattactttttgtactaaccaataatttcaaatcattattggtggactctgagtgatactgaatatataagaaactaaatttgacactaaaagctgtttcctgcgttgaatctttacaatattcttttaatataagagggttatctgataatccttgacttatttgtagaaattctttagtgcag

SEQ ID NO: 1330 - DNA, 801 bp, Plutella xylostella
gatggggattaacctacatacatcataattttattatacattacagcattttgagtatcaattcctaggtttacattaacattttattacaacatctttccaataatacagggatattatatcaatcttgctgtcatagtcgggtctagttcttgtctacaaagtcgctagtgcagaggcaggccacggtgactggttttttgagggctacgtacatgtgagcaaggcttttaggcatgttcagtgatgatctgtcgtagttctctttctcttttagtacggttagctcatataagctgggctggcacgagtaattaggcgagcagagtttggtggtgcagttcctctcttcaacgaaccgcgggaagaaaccctcgccaaggtcttttaaccgtttattgtattcacaggagcagggcgggtccataactgcttcattatattttttgactttcgtgtccccacgcttcctcgtccgagtttcaacggaattgtcgagcaaaatgatatcattacggatcatattcgcatagtcaaaaatcagcgttggtatttcatcactttccgggtcgtaagactccactgtataagcgaccccgagtccatcggctaaggctcctttttcaaaacccctttgctgtctcacatagttttgtttcctcatatgtgttctttggtcttctactaggtactcgtctgtgttttgtttagcttgcaccctggtcagaggtagggccaggtctagacatactagcaggcctaggcaagacgtcattaccttcttcatatctggacgcctcg

SEQ ID NO: 1331 - DNA, 2878 bp, Plutella xylostella
taaattataataatcgaatctcgactaataaaaaacccattcaaacacattgttgttaataaattatcttatgctttcagatgttatcaaaatctatcgaatcaaagtgtatgctgtaaggaaacaattcaatcgtcaatttatcagtatcacagaatatacatgatgtaaaaaatcattccaattattttaataaacgcttaacttcgaagtacatacaatcaactaacttccttaactaactagtactaaccatacatataaagagtcgcaaaccagaattgcatactcacatgattattacacttgtggtatgacaagtcatcaacattctgccaagatccctgtcctcctctcataagctgcttaatttcctatgggtcaccatttgggtaacttcatcttgccacattcattcataaaacgcgctaaaataaaaaattctctatgaaaacggctgctatttcataagtatggttgtcggaagaactattgccacttacgaatagggcgaggtagcccactcgtcctccatttccatatacatagtttctttatctccgcacgtttcacaaccatcacatgcataaaaattcaacaatgtcccagtgcatcataccggctatataacttagccgcaagttttacaaccatcacatgcatattatgacaaggtccctcacaccacacgtagctcctaccacttagcaccttatatccctagcgcgggcacaggggcgtagttcgcagtggtggcgttgggcgcgcacgcttgtcgcacgctcatctcccacgcgtctagtagctggcccacggagcagttctttggtaatctggcacacttgtggtccatggccttgttgagcagcttcaggaagtggtcgggcttggagtgcgcggcgcgggcgacggaagcggcgggaggggaggcggggtagccgcgcgggacgaacacctgtagagggggcacgcaggggagtcgcgctgattgcagctccgcgaatagagagatgctgccttctgagccgagggtctgcatcgtgtccagagataccttgaatctagagtcgagtcgggctatttctccttgtaatacgtcagggatctccattggaggttcttccaccttggcaaccttggctggtggtggaaggtttttaatctcaggtccattgagcgcgtgcaacgtagacccgaaggttcgcttcagcgtgtggttggcgagcggcgactgcaggcacttgttcactacttctagcagtgggttgaagatcttcccctgcgcgccggagggcggcaggccctcgctgcgcttgaagtccagcttctccagcaccacctcgcacttcatgagcgtgtccaaaggcatgcgcttgtgagggttggataagatgtctaggaggttcttcatttttgtcagcttttccacgttctctccctcgcccatcatgcggtgcaccatacgacgcagcggctcgatgtacttggacagctggcgcaccttgtccctgtatgccgcctcttcgccccccggcgacccctgcccccccactggggtgttgagggaggaagagggggacgctaccatgttcattgttacgcccctctgttgttgttgcggatggtgctgcatgtgcggcggcgcggagggcgaggggctccccacgccggcgcagccgcccatcgggcccagcggcagcggcgactgcatcgggccgcccatcactcccatgctagctgggctgggtccctgcatgggcgacatggcggagggcgacgggctctggcggaggaactgaccgggcggcggcgcgcgcgagtatccggcgccgagcatgccgccggcctccttgccgccgacgcgccccatgtgctgcagcatgcccatcgacaccatctggttgccgcccatgcccatctgccccggcatttgcccctgcatgccctgctgctgcatctgcccgccgagcccgcccacctgcccgcactgcatctgccccatgccttgctggcccatgggcacctgcatgccctgattgcccatggccatgttgggcatcatctgcccctgcatgccgggcccgagctggccctgcagctggttgcccatggggttgcccatgcccatcatgttgttgcccatttgcccctgattgggcaccatgcccatcggtcccatcttgtgctgcatgttcagcggcggccgctgcgtcaacgtctgcagcagattcgtggccgtctgggcctgcgggccttgattactcatctgcccctgttgcatctgcccctgcatctgcatattagggttgggccccatttgctgctgcatctgtgtttgctgcgggcccatgttcatcatttggttgcgggagccctgggacgcgaggttctgcagtgcattgatggggtcgggggccatcccgggctggcctggcccctgctgctgctgctgctgctgcacctgagggctctggcctggctggttctggttggggccttgcatgtttggcgcgccttggttttgcttggtttgcgcgttatagtctcgtacatgcaggatgagcttggcgaccatgttcatgtactcctcgcgggtcttggccttcttgaacacatggttctccatctcactgctgttgcgcgccacctgcatacctgacctctggattgcctcttcaattttagtgacgacattttggcgaaatgtttgtgttctccagttgtcttcttgtcccatagtgttgaactgttttaagttatccatggtaaaggatctataaatatcagttttaagacacaactaaagcaaatttgtgaagaaattagaatgagaagaaatgtatcaagctcacaagctccataaaatgcacgaaacaaa

SEQ ID NO: 1332 - DNA, 3094 bp, Plutella xylostella
aaccttagctttattattcacttttacatatatcacactctttcagaaacattggaaatgataggtttcggtctagacttgaacagcaatttcttcttcactattgccttaactttgtattcggtgctgtcttcttttgttactttttcgaggactgccattggttgttctagtttgacttctttgccgctcaagatgtggtgtcctaggatgagagtggggtgcccggagcgggcgtggtagtgcaggtctcccacaaccgtgcctccctcggtgccatctttcttcatctggaccagtccttgcagctccacgatcgcccactccggcactccgcctccgcaatccgtcttacacatacatctaatatctgaacttcttgaacagcggatgcttgttattcgagtgcccgcgccgatgctcgaagtacaaggcgtcgtctccgccggcgagcgacgacagcgcccccccgcgccgcaccacctccccgccgacgcctatcacgcgctcctcctcgcattccgtctcggatgctgctagcacctgctgcagtagcatgccgtgctcttcgcgagttccgtagaacagatctggttctgtgtccattccttttaactctgttatcaccttgtagctgtacccctggttgacgaggaaccgctgccgcttccggctgtaggccatctcgagcgtgtcctggctcaccagcgtgtagaagaacgcgttgtattcctcggcgaatgcgcccttcttggctcgcaggatacggcccaatctctgcgcctcctgccgccgcgaccctccgtgcgacgagatctgaatcagcacattcgcctccggcaaatcaaagctcgtatccgcgactttgctcacaaatatcgtgttgactttagggttaaacttgaagttctgcagtatctgtatcctctccccttgagacgtgggtccgtagatgtaggggcggttcatcttgacggcgtagtgtcttagtgcgaacacgttgtctgagaacacgatggtcttgtcgccgcgacgctcgtggtagcggactaggaactgacaagcgcggaacttggacgggttcatcacgtataggagcatcttcttgttgattttctgtatgaggtactcgcggtagaactcgggcgtcatggggcaccacacctcggcgcactgcacgcgcgcgatgtagccgttagcctgcagctccagccagttggcctcgtatagtttaggcccgatcaggaagttgaggtcggcgattttgtcgtcttcacgtagtagggtcgcggttaggccgagtttagcgtgtgagtgtacgatggtcaacacccgccggaacatcttggcggggattgtgtgcacctcgtccagcaccagcagcccccactcctgctgctgcagccacttcatggtctgctcggcctcccacgagcgccgctgtccgtgcgtgatcatggagtatgtcgtgatcaggatgcccgcgcccatcggcttgtctttcgcttctgatgtgaatctgcagatcatgctgtcatcggcggtggaccagcacttgaactgctgcttccactgctccaccgacacgccggagttgcacagcacgagcgcgcgcttgcggacggtacacactgctgtgacgcccactagagacttgcccgcgccgcatgggagcactatgacgcctgatctggcgcgtccgttgccgaacatctttctgaggctcttctcctggtaggggcgcagcacggccgtgggcttcaggtcgatgttgatgtcggggttcaccgcgtcgttgcggaagtcgtactctgctagtagcgggtgttcgagttcgatgcaccgcttttggattacctcaatcttatccgggtcgacctcgaaggcgacggcggcgctagcagtcaggtcagtggcttcttcatcatcttcctggtccagttgttggtacatctcgctgatgtcgtccgggaccgccccgtcggttgccgccggtttgtcttccgcggtgctagtattgggcacggcagccttccccggggccgcagaagctaataaatcatcgtctccatctctccgcagccgacactgctgcactacagggtctttcaacagcttctgtagaacttctacgtgcttgctctctactaggtatctattatgcttgagcacgagcttgaccttcccgtaggacagcgtgcacagctgtatgaactgcacgatgccggccggcacctcgcacttgctcagccgctgcaggtactcgattatgtcgttagtctgtaatccgactgagacggctgcgtagagactgtaggctgtgagcttgtactcgtggatgtgttggggccggcacaccggctcagcaatggcaatgaggaagtcgtgcgcatgcttgtagacgggcgagaaggcctcgaggaagatgtgtccgttgggcgccacccacagcggccggctcgcgttgtccggcttcagcgccatctgactcctgtagtccttggccccgaactcgtcttcgggcacctggttgtcgttcttctctgcatcctgcagcgcggcgcctggtacgcccgcattctcagagccctcatcctccactaggtctatcgtctcctcttccactttctttcttttacttgatttatcaccaccagacttggaatcatatttcttaaacttctttggtggacccatgattgagagtggatgaaaatttatcagttgtaactatctgaaaatagagggcactgttttatattaattattatagcatgcattattacaacaatagttacttaagttaaaagagaaatacaaactatgttgccacttaccttgtactttaaaaatattatttctattgtaagtaaataatattgatatcaatcactaatatgttaaagaaataggaaataaaacacctttgtcatctaactgtgacatttctcaagaaaagcaagattagaaggcaataatttaggcttcaaagtatttttaaccatttgaatcctgtgaaatcagacatctattgtatctcatcatggataacagacaactctagattctataagactcactatatcctcctatt

SEQ ID NO: 1333 - DNA, 3512 bp, Plutella xylostella
ccatggcacattttttaattatgaactatctgcaagacaatgttgttgtgtgtagattaagtttagcatagccctatacatatatttgaaaggtactttcagcataaaaatgaccagcattttggcttcagagtacctgcatgaaaaaaaattatcttaacaaagagcacttacttacttttgatttataaataaccattaaaatttaactgtatgataaaattattataggtacttaacttaaaagttaaaacgaaacactacaggcttttcataataggtaacatcaataaaagttaaataagtacagactaggtacaaacattgcacacaaagctttcagaaagcataataatacttttacccttaaaataagacattgacaaacaaaaatcacttataattacgttcagtggctctgtcgtctatatttttatcattagcataattctagttattcgtttcattaactagattgatccattcatctccttcttgtacaattggaagctagattacacatatccgtttacaaataggttgctcgtaactccaggaatcattcagatcacttcacacctaaccaactgtttggtaatattttgcataagctctttttatttgatttaaggaacgtaacgcacccatacaaatgttgtttgattaccatacttcacatttatgttttggattcatcgcagatcccaatggacagttaaactcttcagagaactccttgaggttagatataggcccaatcacccgatatctggctactgtgtggtcatctttttcaatctgcatctttgttgattctttggtcatcgcagaacaccaaacctgagcgaaagaaatgaagaataactgacgatggttgtacttcaggccaggcagagttacattggcttttgatgttttactgtagtccaaatatgcatggaacgacgcttttagaccaccgttgtcagcaatattttcaccgagcgtagttattccattcaaatgatgcccatctaatgaatatgatgcgtattgtttctcaatacattcagctcgtttcttaaagcggtctattgtagcattgttccaccactgatttaggttgccaaacctgtcgtattctctcccttgatcatcaaatgcgtgcgtcaattcatgtcccatcaccactcccatggccccataatttacgcatttcggattatcgccatcgtagaaaggtaattgcagtataccggctgggaaaactatttgattccttgtcggtgtataataagcgtttacagttggtggcgccattccccatttagttttgttaacggccaggtccaatcgtttcaagtcgttccgtagcgtgtacatgttgaattcgatgttgttctcaaagtactggtttggtctgaccaccaagtcttcatactgcttgtctagttgctccttgctcaggataaagtcagggaaaccaatcatatcagtgatatcgtcagccttgatctcggcagccttgcgggtctcggcgtccatccagtccaagttgaggaggttcctcttgaaggcgttccggatgttgtcgatcatgatctcgccctgggtcttcgcctcgcccttgaacacttcgcggacgaacatcgcgcccactgcgaagccaagagcattagtggtatcggtgacgcagtaccgccacgactcctcggtgccttcagacccaaacaacgccttcctcagtatcttgttggcatctcggaagttcttcgacagatacgtggagagagagcgggacacctgccacatcatgtagctggtcagggttttcttatcctcttctgttttagtgtattttctaataagcttagtcagattcttgaagtagtcgggggtgtacactattattctttcctctggtgatatcgtcctattaaccaatttaaacgcgtcattaaagaacatggtccagttcagaaacggcgcttcattctgccaagccttgatcgtgaacggattatacatgccctcctcatcccttctgacctccgaaggtgtcgtaatattggccagttctgtctcaaactggataaccttagccatctgggctctagcttcgactttgttcgctccgagcagtacacatattcgggtcatgtagtccaggtaggcgtctaagaccttcttgttggctgttttgttgaggtagtagtctctggttggtaggtttaaccctccttggtcaagaacaagaacgtgacgtgatgagttccgatcgtcttctgaaactgcccagttgaagagtcctcccagattgtacgtgttctgcacgccctgcagcagtttctgcaggtcccacttggcctgcttgatcatggtggcgttgagcaggtgccagccgcccagccgcttcaccacgccggtcagcggcctctccgccagcttctccatggtctcgttggagtcgatgcaggactcgtagtagatgcgggctttagcttccgcgccggctgggttggaggtgttcactttttccagcgcatatctcaagatcagctggttctccagctcaatcttgctgaagatgccccagttggacttgccctcgggcagggggttactccggatccagccgccgcaggagaactcgtagaagtcatcgcaggggttcttggtctcgtccagagcccggatgacctcgttggcagtgtagatgcacgagcttgtgaggcagacgtcgctttgttctttaggctcaggctggtagcagggcggcacgggcaggtacgcgggtcctctcagagccagcatgaaggtcgtcataagcagcaccaccaatagcagcacagctgacagcacgagcagcgcgcgctccagccgcgtgcgctggtgccagccaatgaacgagacgcccgaagaaaagctagaatcactactggcctcgggcttgggggcagcatcaaaaaggttcagccgggaactctggaagagatctgcactggagttctctctcccaaacaactccgccgaagagttttccctcgtcagcgatggtcttggcttcacaaaagggttgttcgcgtttctagtaaccctttgctgctggagccagttgaacttgctcctattggccggctcctcagctgcctcatcgtgattggtcgagccgttcggcgccatcgtcgtcatttgtttagacatcaggtcagcggtggagttttcccgcgaaaatgccgggcgaagtttgtggaatgggttcgatcgtccgttgtttttgaggaaggagaatttgttgtgttgagctggtgtgggggagggagtgtcttctggagtcgggaaggatacggtaggagtgcctggctcagattgagggctcgacatttttgccttttgttatggttataattttaattatgaacgttttttaatctcgatatggctacttaactgatatgagaaatttagaattaataatttgaactaatagcaggtagagaatctcaaaaatatcacgatacgtttatttcgat

SEQ ID NO: 1334 - DNA, 413 bp, Plutella xylostella
ctaaccgagccgggattggttcatcaattatacgtcatctccatatagaattcttgacagatgtgtcaaaagtcaaccactaatacctacctggttaattggttatgctctaaccgactatggagaaattggcactttctgtcaatcaaaagtcaaagaactaatgctatattctacaaagtacagtaaacaatgtgagccgtgtaagcactctattacaaacatccggagcgacagtctaaagctgcgtacagaccggcccaacgaacgcctaacgatggatatttatcatacataatacagggcagattgcagccacgaatgtcaacaaaacccgttcgttggcgttcgtttattggttgtattcctcattttctccgttggcctcctcggggttgtatttgttttcatcc

SEQ ID NO: 1335 - DNA, 414 bp, Plutella xylostella
aaaatcatcagtgtttggggaaactaataagatggcgcacttgcagccttgtagcgtttaacggctgcactaaccggaccacgtctccagtggactccaccatgggatatgcgcggtagtgctcaaccaacgacacgaggtccgggaactgctggccgccccctatgtcgtataaccctccgtggcgacggatgatgatgtgcgtcacgtggtccctcgtccgcaccgacactacgaagtctcccggctgtgattgggattcgcggacgaggaatgagccgtttttgccgttttctagcatcattcgctccgcctcttttgcagtcagctggccgtggtaccaccgctctgtggtcggatcagcgcagtttagcggcgattttaaccggatgatgctgccgctcttttctctta

SEQ ID NO: 1336 - DNA, 443 bp, Plutella xylostella
gtgcatggtagcgttaggctcaaagccaactatgtaatagttcttgttagggttgatcctgattggagtgcataagtagagttcatcccgactggggtaaacattcggcatcaacaagtcaaatttatcgacttcgatctttttccgatagcaattagcttcaattatgaatagaacagtaaggaaaatgttaactagccaccacattttaggatattaatagaagttaacactaaagtattttaaaagtaagagccaagatacggcgaaaatatttttcttgcacgcgaaataaatgccacttaaaataagcgactgatactttgtgtcaaagttagaacactgatttgatttggcgtttcgtttaatttttatttgaaaacaaatgaagcacggttatcgttatcagtgtccgccaacaaacttgaaccaactcgatcgat

SEQ ID NO: 1337 - DNA, 449 bp, Plutella xylostella
ctcgtatgatattgatgatgatgatgattgaatgattttatctgataaaacacaacaaaaatgataaacggttcatgatgatgctgatttacttacctgcctatttactggttttttcataaatggagggaatggtacaaacggctaggtagtggcagaaatatagtttagagagcatcaacttacaaacattaattattttatcttatccaacgtttagattttaacaagtgtgaggatggcttggtcagcatcactaggtaaatacacaaacgcaacttttatttttagaacttcaaattactcatacccacctaattcataaatctgtgtctaatggatccaaaacaatgacctgatcactccaagcatgaaccctcacaagtcaaaatccacccttactccctacgctccactaatgtcttctcttgtcgcgtcgcggcgggcag

SEQ ID NO: 1338 - DNA, 451 bp, Plutella xylostella
ctgcgccgcacccgcattgtcaataacactgctcatagcccacttcctaatacacctgagatgcagcacgtgatagcagtttccgcacgaccacaccgagtcggtctgcttgacgcgctcgcagcacaccaggcactccagcgtgcccttgtccagctgctccgagagccgctcccgctgcgtcaggtctgatgcacctgcatgatcattgtgtgcgttgctgttcttactcttgtttctcattggactggaggccccttggactttactgcccctctcctgtcctttgctggccctttcctccctgtatggcatgtagttactagcatactgttcatcatccatgacatttctctccgaccgtagtcgctggcttcctgcccagttacgattattactcagaggaccttctgaccccttgctattccttggatcctgactctttctatct

SEQ ID NO: 1339 - DNA, 453 bp, Plutella xylostella
gacatcgtaacaccttttacatcacatcgtgatagatatctcatagtcatttcatgccttcgatataaaatcctcgtatttataaagcaagtagctgagtgtgtataaacagatcgccgcgcggcccgaccgcgccacagactagtctaacacagaaaccaaaatcgattatggtaacaaaactagctaaaatacaaaaaagagaatttgattcgcacacaactttcataaaaatcatgagctcgcactaaacctaataagtcttacctctccgcacaagccaggctcgcttcgggtcgctccagtcgttttataataaaattggcacattacataaaggaatcacaacataaaaggtgaacacaactaaaaatacgatggaccttgggcccgggagtgcgacgggggcggtcgctagtagaccttgatgtactgcttgccgtggctgctgac

SEQ ID NO: 1340 - DNA, 454 bp, Plutella xylostella
cgtggccgtcgcctggttgtacttgaggccgcggacgatgccgcagtttattactacctcgtggtcgttgagcttccgtccgacgacgcggaaggtgttgtgttgcgtgtggtggtagatgtgcaccttggagagcccgcacgaggtccctgaggggacccagcgcttctgcccgtcgtcgtacaccatgactgaggcgcgcgcgctgcttattgattgctcgctcattttggaagcaattatcctttgtattaactatgtaaacgcactaaagcacatcacaccacaatagttcacttataaacagcatattctcactgatacaacaacgtacaatgaatcattattattttatcggcgcaaaaacacttcccggacaccacgaaaggtagccatttttgacaaaaatcgctttttcatttttcacatcccccgaatcccgattttggaagac

SEQ ID NO: 1341 - DNA, 471 bp, Plutella xylostella
ccactgagaccgtgcgcgctatactcaagattgacgatatcataaacaccttgaactaaccggattctcacgctttttgttataaaagtattaatattttagttttcacactatacgagcttacaatattaacagtctccactccattgcgggctcaatgattcatgcaaagctacgagtatctctacactatgcaaaatgctatgtgatgttttcacaattttattctttaggttatagaatgctagccattaacttatattgtatggaattaaataaataactaataaatctaattcttgtttttcttcttaccccctgtcatacctagggaatacaagcttgcaaaattaactttaaatgtggttgagattatataggtggatatgtattatctaagatactatcgaccacaaggataaggttacaaacaggtggcttgtattgaaaggtttttatctcttatgttta

SEQ ID NO: 1342 - DNA, 479 bp, Plutella xylostella
gtacgcctcggcgatctgcttcatcttcgtcagcaccatgctgctgatctcctctggagcgaaccgctttgtctctcctttgtattcaacctggatcttcggcttgcctccgtcgctgactaccttgaagggccagtgcttcatgtctgcttgtatcttggggtcgtcgaacttgcgtccgatgagtctcttggcgtcgaacacggtgttgttggggttcagcgccacctggttcttcgccgcatctccgatgagccgctccgtgtccgtgaaagccacataagatggagtagtcctgttgccctggtcgttcgcgatgatttccacgtttccgtgctgccacactcccacacacgaatacgtcgttccaagatcaattcctacagctggcattttgttattcttggttttaattcgcttcgtaaataactcgtagcgtttccgctaaacttcttcactcctcttttcgctttgatttc

SEQ ID NO: 1343 - DNA, 483 bp, Plutella xylostella
caaccaccgacgtcacgtctacgacaaacaacttctactaaattcgggttcaaattccgaaaatacaagaaacttattaaattatccagtgttcaaataaaacaagttgatttttctcataataattaactccatcttgtcattgcaacaaatataatgatcagaataacacagcttctcttaaaaccttgaggttatacctatcatggtggatttgaatattcaaaaacacctaaattttagaccaaagcaaatttaatataatgaaggaaacacattaacaactgcatgtgtgggtcaacaccatccttaaagcgtttaagctttcgttatgtgataaaaaagcaactccatacaaaacttacgcttaaagctaacttggcgtttgtattgctctgtattttaacctcagaaatacatacttagaacactccaacagagcggatataaataaaaaatggttcgtaaaagtatatcgcttgc

SEQ ID NO: 1344 - DNA, 483 bp, Plutella xylostella
acgcgcccgaaccgcaccgcatctctgctcatgcccacggcgatgcatttcttgaggcggcaatattggcacctattgcggttgatccgcaggatggagcactgctggttcttggtgcagggccggtactggatcttctgttgtatggagcggcggaagaagcccttgcacccctcgcaggaatgtactccgtagtggaagccgctggccttgtctccgcacacgcggcacagcaccgtcgtgccgtcgaactctatgtgcaggtcgggctcggccgcggggctcgccggcgccgcgtagtgcccgtagctgctgtccggggacatcactaatgccatttgttcctctgttcacacttcaccacactagccacatccaggggcacgtcactccgcatgcacgcgcggatatggggcagcgggcggcgggatgaaggtcgtcactgagtgctgccacacgcgtgcgtctcgctcgggctccagc

SEQ ID NO: 1345 - DNA, 485 bp, Plutella xylostella
ctgaccaccttgagcttccctgacttttccctgactatccctgactttccagaaagtggacaccctgttaacgtatgcatcccttagaataaggagccacagttcagaaactccaactctatactgcatccgattcccattcatacattttctcctatggtcattcaatcaattcatttaacacaacataatcattatcacgctgagagtttcccaatcctgtcgtccagtttcttgatctctctctgaaggctgtcgacgttgtgtgcgaacacttcctggacaccctgcagtagctccttgttgttttggacgcctcccgcgatgctcgcttgcagggtttctagctccatcagggatttgctgaagttgctcgcttggttgtgaagtgactcgagcgcctccatccgctccagtatctccgagtgtgagatgccgtcgatctgtttcagcagcttgtgtagctcattcaccttagcatcagc

SEQ ID NO: 1346 - DNA, 487 bp, Plutella xylostella
attgaaaacaacagtatcctaattcacttttattagctgaatacagaatctagccttggagtgaacaggaaaacaattttggaatgtaacgtctcgttactgggctattgcattatttacataaatatatttcacatcacaaatggcggaagtttcaagcgatatcacacaataaatagtaacatctcgatttacaacagattttgattatacatataatttgaacacatgtcaacaatttgtgcacaaaaataactttagctaaatattgttagagtaatatttgaaagtttgaagcaccaaatttaaccgctcggtgcattctagagtacaacatgaaaatatatacacaagtcggtcggtattcagcattgcgacggccgttacttaagatttaaatgtttttatataattttgcacatgatcgtaatacattataataaactattaacaacttactattaaacagtattatcttacatagtat

SEQ ID NO: 1347 - DNA, 488 bp, Plutella xylostella
aaggtagtctacgacagcgtccataagagtttgtacaccaatatttttgtaagatgacccgcacacgatcgggaaacctttcatatcgatagtgcagcggcgtatagctgcagttatgtctttactttgtatattgtctaaggattcctcctgtatgatgatgtctgccagattatcgtctaaacttgaaagtgtgtccacaagatgtctgtgtccagtcatagttctttcccagacatggccatcgtccttctctgttagttttcgtcgcgtatatttttgacccctcccctgcgtccagattatttcttccaagttcaacaagtcaagtagacctattaactttccttcatgtctaacaggtgtatgtagaagcaatggtgttgcgtctagtttttcttcgatagatttgacgcaagctatttcgtctgcatcagatcggtccattttgttcagatacaatagacgaggcactctgtatccagctg

SEQ ID NO: 1348 - DNA, 499 bp, Plutella xylostella
cccgccgggaaacgactctggagggttggaggtgcccgcactagtggtattattagtcttgccgcccttcttcttagtactggcttctacttgattaataatcggctgtgggtcgatgccgccgcggtcgaagtggcactcgtaggctagcaggttcttcgtgtagtgcttgcggagggtgtaagcggctgacgatgatgcgccgatgccgagcaggcccgctatgtctttccacgtcttgttctttgtcacctcgacaaatcctcctctctcgcgcaccagcagatacagtcgatacaggtctagcggctgcttggagatggtggggcaggcgccgatgggcgtccgtcgctcctccatgaaagcgaacagtcgctccagccagctgcgtcgctccggcgactcgtccatctcgaacagcttgcccaacgagtccgatttctgagcctttgatctgtaggactccggcggtatgtgactgttaaacacgggactagag

SEQ ID NO: 1349 - DNA, 502 bp, Plutella xylostella
gcaccccgtgctctccgctcacgtccgtcagcccgcggatcttcaacatctccgccactttcagcagcgccgtgatctgatcctgggacacattgatctctccccggtacatgaagtccaccaccgccttcaggtcgcagtacttgatgtcgcgcatgatgatgatggggtgccggcacgggttgtccatgaacagcgtctggaagtaggggctgcaggcggagagcaccaccttgtgcgccttgaggctctggccctcgcacgcgagcgtcacgtccacgaaggactcggtctgcaggagctggtcgaagcagctggccaggttgctctggtagttgttccagcgcaggcagaactgctgcggggagccgtcggcgcactcgcggccctccatcgccgcccccggttcttcctcggccggcatgtttagcgttggcgggttcgcatctgcaacgtgacgaggcgtgtgtgagagagcgactcgacacgtcctcacggtgcg

SEQ ID NO: 1350 - DNA, 522 bp, Plutella xylostella
ccgcctccaggatctcctccatggggatgatgcgcgagttgtccccgtaggcgatgttgtcgcgcacggagcggtcgaacagcacgggctcctgctgcaccagccccagctgcttgcgcaggcgccgcaacgacagctgccgcttgatgtccttgcggtctagctccacactgccttcattcgggtcgtaggtcctcatgagcagctgcatgagcgtggacttggccgcgtcgggtagcggaatgagactgacttgtactcgattgtgccttgcgctgaccagctgggatcatcttcaacggaatcctcagtgacgatggcgggcgtgcggttcatgatctgtataatacgggccccggagcgccgcgccgccgcgaagttaggggcgaacgagagcgcctccgccagcatccacgcgccgtagatcagcgcttcggatactagtatagcatattcatacggcatgtcttccctggcgatgagataccctccgtaggccagcgagatggcgtatccaagagt

SEQ ID NO: 1351 - DNA, 523 bp, Plutella xylostella
gttaaagaataaatcaataaatgatttcaagatatacacaactataaaaacatttaagataatacttaatcataatataataattatatatagcgaaatatattatgtgcacaaataaaattctaggtgacttaaaatttgtcttagtcgttacttgctaatgaatttcctagtagagcgcagagtcgggactctctcgaacgtttaccgttttacttttaataatttatttaattttacataaattttgaatctgaaggcctaaatgcgagtgtcgtgttttattttatttttgtgtgttcccgttactccagctgctccaggaagttgggtgtcttgaagtactcgggcacggggtcgtcgaggcgcgagatcaccttgtagatgctcttcttccagctctgctccgtgtccttgccgccctggatggcgcggaagaactcgcgcagggtctgctccaccacgtaccggaagttctgcgggacctcaatgtggttattgcggttgtagtgcaggttgagca

SEQ ID NO: 1352 - DNA, 530 bp, Plutella xylostella
ttcttactaactaaaaacaaaatacctcttcaacaaaaccaaaattgtcctcatcataattctattcataatcctcatcattgctgtcatcaggctccgaataatcttcatctacttccaccttccttctctttacaacctgtacattctctttttcttcctctttatcagtttccttggcttcgaccttggctgatctgtggtggaacacaaacgagatggtcttagctagatcccagcattgcttcaacaccatgtcagctagagtcttcttgtctgcacagtgataccagttggataagtccgatgtgcagtcagaattctccggcggaatcgtcacttgtatgttgttcacgcatcttttacacttgaacttgctgtgagtgtctgatagtgtgttctcttcaagcctaaacaagtccttcaggtcgtctgatgtgaaatgcctcaaagattcttcattttggtctacaacagtgtcgctaagagctttcttgtgagcttggcgttggaatattttctcctcaatg

SEQ ID NO: 1353 - DNA, 530 bp, Plutella xylostella
accgctcgaactgctcgtcgatgtactggattatagacttaaagcagtcagtgttgtcgatggcgtccccgtagccgggcgtgtccaccacggtgagccgcagcttcacgccccgctcctcgatctccaccgtggacgcgtccagcttcaccgtctggttcgtcttctcaatggcatcagggataaccctctccgggtacaagtcagtgaggaacagagagttaacaagcgtggacttgccgagcccgctctccccaaccaccatcagggtgaactcgaagcccttcttcaccgacttgcggtgcacctggtttggcaagttggcgaagccgacatagcctggagtctccaggtttgagaaatttttattattagccgtgtcgctagacattttgaattatttgttgggactcccgtggaattaaatctgaatgtcgatcaggacagaataacacaggaacaattattgaaacgagtagtacacaatagatgcagatgtggtaatttttaagtacttttcgtagtacaaa

SEQ ID NO: 1354 - DNA, 561 bp, Plutella xylostella
tcagccatataaaatatcgtttgaaaagcaagctgaatcccattgaggataaaacataaaaagctatacgacctgaattcaatttcagaatagtaaccagcattatctgcagtcataatattgcaactgaatatccctaataacatttcaccagtcttaaaacttagcccataaagtctcaaagacaatttaaattaaataaataaaatataaaataaataacaacacacgttatgaacgcgattcatacattaaaacatgctgtgcaagctatatctaataaataacattgtaatatatgtttgttcttagctaatacaataactaacatacaccgacaccatagctgcctagacgctttcgtcatattcctaattcgacgaagggtttcaagatggcgacattatatggaagcagtaagctaatagaatagctcaggtgagtattgcatctatttgtgccattctgtcgatgctatcattcacacaagcgccaaaacaccgcaccacctaaatacgcctactttgcttttaaaaggtaactaaaaatgactatacataa

SEQ ID NO: 1355 - DNA, 594 bp, Plutella xylostella
agccacctgcctttgagctgagcatgaagatccactccttagagtctttatcattgaagctctcaacaaccttagctcgtttcttgatggtcatggacccatccagcctcacatactggtagcaccgcttcctgcacagcttctcaaataagtccagtgtttgtgtgtagttagatactaacactattttgtcatcagtgttggttttcaagttagccaagatgcagtctaagatcatcagttttcctgaaaactctggcttcacatccttgatgtcatagtgactgggcaacagatccagtgccttttcaaagccctctgacctctccacaattttgtcatagacaaggtctgggtggttgcagagtttcttcagtgttgtgatactggacagggcactcagggtgttaccagatttctctgcatttccagagaatttattcctgattgaatcagagtttatgaaattcttgtagagctgtgtctgaaggggagtcattttgacacaaatgacttgctcaaacttgactggcaggtacttggtgagtaaaccactggttctcctgatcatgcacttgttcacaattgatgtga

SEQ ID NO: 1356 - DNA, 600 bp, Plutella xylostella
ccaccaccatgaggggcttgacgtctgtgcagcgggttactatgcctctcactgtgaccagcttgccaatgtgttcagccttcacctctctgatgggcactgactttgatgaggacaggtctttgaagtacacttcaaatctcctgataagttctggtgggtatctgttgcgggggtccctcatctcgccggggatgcggtggttccgcgcctccagcatgatgcggtgctcaatgtacacatccagggaatctttggcaacaacctctcggtgcttgtactcaggcagcatatcatagacgacgtcagagaccatgttggtgtagcggcgcgtgttgcgcagcaccgcctccgccagctcctcgttcgcctcgtgcaggtcgtccagctccaccaggaatgccgtctgttcccggtgagccacgcgggtgagctggtcggcatacttgaacaccttgtgtccctcatcatcagtctgacagaaatccacgaagaagttcttcaaagcttctttatccgcggcataatcacgcatcgccattttcacagtatttatgtgctaaaattagtaaatatcaacaaaattattaaaatcaaaat

SEQ ID NO: 1357 - DNA, 603 bp, Plutella xylostella
tcccctcgaccttgccctccttgcgctcgatggtccaccccttgaaccacggcatcttgtcggacggctccagcatgttgtccccgtgccagcccgagatcggcacgaacgccaccgacgccgggttgtacccaatcttcttgatgtacgacgacacctccttcttgatctcctcgtagcgcgcctcgtggtagggcggctcggtggagtccatcttgttgacgcccacgatcagctgcttgacgcccagcgtgaaggcgagcagggcgtgctcgcgcgtctgcccgttcttgctgatgcccgcctcgaactcgcccgtgcccgccgccacgatcagcaccgcgcagtccgcctgagaggttccggtgatcatgttcttgatgaagtccctgtgcccgggggcgtcaatgatggtcacatagtatttggcagtttcgaacttccacagagctatgtcaatggtgataccgcgctcacgctccgctttcaacttgtccaacacccaggcatacttgaaggaccccttgcccatttcctgagcctccttctcgaacttctcgatggtacgtttgtcgatgccgccgcatttgtagatgaggtgtc

SEQ ID NO: 1358 - DNA, 612 bp, Plutella xylostella
tcagaccgtgcggcatgtagaacaagttctgaccccatttatcaacaatggatcctgtatcattgaaaactagcagagtgggttctggaataggtttagtagttatgcccttatacacattgtccatgtaaaatgtggtggcatcccacacattggcagcccggtggaagatcaccagtctccccgagttgtccagagccactgccgacacctgcccgaggttcactgagcgatccggccactcggggacccattctggagcatggtctagcttttccaaagccgtttgtatcttagcatagtgattttcttggcctctgttatagtagccagggtaatacccaggttccacataacttcgacagttaatagatgttactgacgaaagcagcacaattaaaacttttatttcagtaggaataaaatcaatcgaccgaaattgcattttaaaactgtatcaacactaacgactgagcccggctgagtggctggagattaggaaaatcgattgatatctatcaacagcaggcacttaaacataacaaatgaaataaaccagccctattggcattatcaacatttttccgatttcgattttgatagattttgata

SEQ ID NO: 1359 - DNA, 619 bp, Plutella xylostella
ctcgccggcgccgctactgcttcctcacggggttctcgaacgcgtttggggactcttccgtaccgcacggaatctctgctcatgccaactgccaggcactttttaaaccggcagtattggcaccggttgcgattcagtcggatcacgagacacttgccgtctcgcaagcagcggtactcaatctgcttctgaatactacgcctgaagaatcccttacacccctcacaggaggtgactccgtagtgatacccggaggccttgtcgccgcacacgcggcacggcgacgccgccttgcccgccgccccgctggcgctatccgccgcctggtagctctgctccggggaaccaccagacgacggtgaacacggctcttccttgaatgtatagaagtcttcttcctcatctaggccggacgaactcgtcgcttccacaagaacagtgccgctcatcactatttactataaaaatctaagaattaacactgataaaagctacttgataaccatttttgagtttttaaaatatttgtataggttagagatgacagtgtttcataataagccgtacggattcataggttttccgtgaagagccgcggtcgggaactactagaaatgtt

SEQ ID NO: 1360 - DNA, 628 bp, Plutella xylostella
attctgttatcacttttgaaatattgtgaccattgttaacagtaggttgaaagtaataatttaacatagttcttcagttccagattgcatggtacaatgtatatcccaactttattttaaataattatgtcacagtatacggattaggtttattatacctgtgtcacataggaatagaccataagtatagaactctctttgccaaagactcaacataaaattctttaatccaagtaataaattaatttacattcacatacatctgataaagatgatacaaataaaatatttatgtacataaaatagatctcttcatatcactgtcacgaaagaatctcacaacaacctgttaattaagtaataaataatggaactaaaaagacccttcatactatgagtcatcaaatgtcattctccctgtaccatgctgcttcatgtacctccggtactgtttgtatttattgttttcggcaagtgcctttttagcctcttcatcctttatctctttccacactttaaagttctccttaatccataattcttcatctaagtactcttgcttctcttcatcttctacagcgttaaactgatgttcacctaagttgaggttctttctaattaaataaaa

SEQ ID NO: 1361 - DNA, 646 bp, Plutella xylostella
ccagagtgccgcacttgcgcaagagttgttggaattctttcatattaaacacgaacttcttagtcccagcaacggacctctgcacgttaatacgcaggttattcagaaagtcctgaagtctttctttcagcacttgtaaataaagatggccgccgaccaggatctcttgcaccattaccgcatcagctccttccaccttacacttatccgtagccaacgcatacagcttctgcgccatgaaaaccagcgcgttaaacttatccgtatagtccggtatgtgtataagcagacagcgcttcagcagccaatcagcggcctccacgtcactggtccagggcggcaactcgtatagtttgtgtcggaacatacggccgaggtataggaggcagtcttctgacgtgtgcaggttttcttcgtgtaattcgcgtagcatgttttgaacgcagttagtataatacaagtcatcagtatgcccctgcagcagtatattataaatctcgtggtcagggtagtcgaccagacacttcatgatgagcagtagaggcgcgtagtacatgatcttgcgatgagagaacatgatcttgcagccgccattttgtaggaagtggagcacgttattagtgctagtctgatcatccttcacgca

SEQ ID NO: 1362 - DNA, 655 bp, Plutella xylostella
ctctgccgcaggtccttcttgtacttgcgcttgaactcgtcggcgaggtggttgacgaggcggttgtcgaagtcctcgccgccgaggtgcgtgtcgccggccgtggagcgcacctcgaacagcgcgccctcgtcgatggtcagcaccgacacgtcgaacgtgccgccgccgaggtcgaagatcagcacgttgcgctcgcccttcaggttcttgtccagcccgtaggccaaggctgcagccgtgggctcgttgatgatcctcagcacattcagaccggcgatggctccagcgtctttagtagcctggcgttgggagtcgttgaagtacgccggcacggtgatgacggcgtctttaaccgacgtaccgaggtacgcctcagcagtttcccgcatcttcgtcagcaccatgctactgacctcttcgggcgcgaacttcttcacctcccctttgaactccacctgtatcttcggcttgccgccgtcgctgatcaccttaaaaggccagtgcttcatgtctgcttgtatcttggggtcatcgaacttgcgtccgatgagtcgcttggcgtcgaacacggtgttgctggggttcagcgccacctggttcttggccgcgtctccgatgagccgctccgagtccgtgaaggccacataggatg

SEQ ID NO: 1363 - DNA, 661 bp, Plutella xylostella
cattaattcaggtaaacttaagaaagaaggaatgtacaggaccttaaaatactgtatggcagagtatttttaaacgaaataattatattcaactaactaacgctaatggaacaagaagacacatggcgaaattgactcacggttgtaggttaactattactaagattactatctcatccagtcaaaggaagttgttcagttcttttcgggaccaaagaaaggtccagagggttcttcaaaatatctttgccttcatcattcaagtcgatgctgagttctggctccgagtcactcggctcattcttagggcttctaaagagtacagcagtagatttgaaagaaagatcaataggctggtcctgctctatggccacaccacccgccgcaggagagtgcaggatagaatcgccaccgttgcggttttgccacgtggacgttataccaggtggtaccggccgaatgttcaaggccggaataaacgtaccgcttctcggcgagaaactaggagtggacgatccgcttctaaacggagaagtcggtaagttaatagacacggccgaagactttctttttctcgtgtcctttgaggaggaattcctaatggcatgtaaccgcacgtccttttcactgcacggtgaagacgctgatcggaatatgctga

SEQ ID NO: 1364 - DNA, 663 bp, Plutella xylostella
ttcctcatacggattcgtgggtattcaggatatgaacgacatcagagtcaggagttgctttgaatccttatgttcagtcttctctttacaggtgataacacggtaaaagttaattgtccttatacaatgaattttagctgtaaattcaacatgaatatcataaaatatgctacgtaaaatatcgcgttaacgttgaatatttatattaagtcttactgaatttaattgatatatttttaaacctacaggcacaatactgatatgtatttgattttgataagattactttatgtctaagtcataattttaacgatttttcttgggttcatttattattcggctctcagcaagatggtgttacggtgacctttcacattctcgtcatttccgtattttccgaccaccactttactgtcactttgtccggcagagctttcacgatgacacataatgcgttaacactcaaaattagttcattttcacttaatttcccggttatttagggcttttatggcggatgtccttcctcgtccaaccacttcgggaaacgttatcgaatcgctcagtttttacgtcacattgcacaaacatagacttatactgaaacacgaaagaaggtgggtcggttaatgtaattagagtgaatatttgatgttttattta

SEQ ID NO: 1365 - DNA, 689 bp, Plutella xylostella
ttgtctcaagatacctttgcattattaccacaaaccagtttcttattacccttaaacctcaagctgccgaaaattgtggctttgcgaaaacttaatagatttcatgctacaattggaaaacattgccaaaaagaatcaatggaagacaatattggtattataaacataattatcaaatttctagttgacttaggtgattataatttttgcaggtcttcttttcagcaatctataaacaaaaatgatcgtaaactaaattaaattacataaaatgcatctattcacgaggacgcactcattatcaaataagctacagtaacgtcaatgacttctggcaacaatgtactcgcgactggttgtccaaacgcagtggcgatccattgcacgaaatattaaaacagtctctataaatcaacacatataaacttgtccttttatctaactactcgtaaaggaatttgacactatcaagcatttaatcacttggcacaaaggcaacagttttaataattttaggtccataccctgttctcaactccggatacccagataaaactgtcaaagttctctcactaaacacaatatttagaagcaaaataaacttaacagtaggcaataatctcaacaaatattgttttacagttacaaggaagacagaaaactcgtgagagatgtttgactaggattag

SEQ ID NO: 1366 - DNA, 690 bp, Plutella xylostella
agactgacccgtcgccgtggaattcatctgtatctcgaacattacacaatgatattgattgaaacacattagatactctcgggtcgtatttcccagatttggagtgtgcgtataaatcacaaagtcccatcatgtcatcaactctagatttagatgaatgtacactttcatgtgggttaaagtcaagcatttgatcacttattgcattttctgtataaaaatcataatttctcctcaagtaagattcatttcttagctgtcgctcaacttcactataaagagataaagtgtctgtaaatgtagaagccacagtaagattttcttgactcaaaatccttagagggtgttcctcagaattctcctggtcaccatccgctaaattaccatcgtatcccatgcagaagtcaatatcttcttctgtaacttgaagacaacagtcttgcattgcgactaattccaaaggttcatctatttcaattatttctaaaatttcgtcctcctcatcatcaataggagctctacttataccgtttggaccgatttccctgctacgatttgaagctaattcatcatccatcctcattcgttctttgtatttactatctaagctttccatagatacctctctactactaagttgttgaagaagtggaagggcaggaggaatttcagctagttcttcactgtcat

SEQ ID NO: 1367 - DNA, 691 bp, Plutella xylostella
ttgtactaattgcgtttactttacaaaaacagtgaaaaactcttactcagtattgcttatgggatgacaagattcaccacaacaggaggaaagcaacctgaaggacagtatcaatacactgtggcataactgaagcacattttacttaaaaatacaaatgataatgtaagatttacactaactcctggatttcggaggagtagttttacaatgttgtcatcatgcaagggataagaaacataatacatattctgtttaagtcaataaaattaatgctaataaattattcctaatgttatgattattgccataactgaccactaaaataggcaggaattactttttgagcaccagataccttattacattataaaatattcattttagtcttacatttaacgagtggcagtgaacaatggcagtatgaaaatatgatgtaggtatagtagtgtaacatttgtgacggtacttattttatatcaaaattgtatagtatgttaactctttaacaacagaacatactacaactcttcgagtggagaccatgattagacaaatgtaccatggttctccacctgctgaaatacccgactataagagctgatgacgttaattacacgttacattcaacattacagcatcaccagctcacgtaacagattcgtgcataccttccagatccacgtaacat

SEQ ID NO: 1368 - DNA, 694 bp, Plutella xylostella
ctaatttaaatatcccaattataatattttacacattcaacacgcatacgatttgtttaacaccaatcagttttttgaaattccaaagctattccatttacaaaataaaattctacaagtttttaaagactgtcacttttatgagtggccagcgtttttgaatatcgaacctcattggagcgggaactattcagtctttgtcgccaacgaacctatagacgtctgggggcggttcgggcatgcagtagccgtggtaggtgcggatgtcctcggcggcgtaggtgactccagctagcactcctggctccgtgtggtgtctgggacacgtgtggtcgcggggacactggcagaccgtactcgcgttcacctcgtcgatctgttcgtgacgtctcctcacgctgaacagcttgcatggctcctttcgtgagcaccgcagcctactgagcggcgagcacgcgaactggtactggttcccctgttctccgctaggtgtcgtgtacgggagcttcttgagtaaatacgtgacggacatctttgggcaatgacagttgacgatctgctgcgtggcgttactgtctggtaaggagtaaagggtccaagctgcgtccttgaagtaccggcatttaggcagccgtctgacgggctcgcaggtcttgtaaagagtggttttgtctgctaacgtgtgattgtcgtc

SEQ ID NO: 1369 - DNA, 694 bp, Plutella xylostella
cgcctcaggaggtcagcttcttcttttattttactccaactgtattcgatatcctcttttgtagttaatctcgaacagacaacgaatcgaatgatgaatcgagattgatatgtggccgccaccatgtacaatttcttcttagctgttagattatcgagcaggagcttcgtggttgagtctccgtccctcagccggaagcacaccaggcccatggacggctctggctccaccaggaagcggtcgtcagacctcaccaagttggcaaaatgcagtgcgaggctgatgtggtttctgatgtattgcctcaaaccctcagccccatacagcctcatcaccgtccacaacttgagggcccggaacctgcgaccgagcggcatctgccagtgtctgtagtctggcactttcacattagtatcggtgtctgttaaataaatcctctgcacattgaaggcattgacaagctcgtatcccctcttcacccacatcgcagagcagtcgaagttaaccagtaaccatttatgagggttgaaatcaaaggagtctgcatattcgactcctttcatcaggtgtctgtattctgggcagatgaaggcagctcctgcgtacgcagcgtcaacatgcagccatacgttagcttcattgcagactggtcctatttcatacaacgggtcgaaggcgcagattccagtggtac

SEQ ID NO: 1370 - DNA, 695 bp, Plutella xylostella
ttctttacatcggcaatttgaatagaaaataaaataaaagtagtcaaaattcatggtgtatatcctatactgaaaacaatcgcttataagcaacatcaaaagctatttttaaattataactgttttccttactcttataagttatccacttagtgtgaaagagacgtcaatagatcgtagttgtttacagcgggtattcacccgtaattttaggcaagtcagtttaaatgtaaagtgttttgttttgtcacgcagatttccactcatattcaaaatagcatttatagctgattcacaaagtcaggataaaaattatctgtatgcttaaatgctgttactgtgtcaaaactttaggcttgtcgtcctaatagatgaatcacgagtaagcgaaacgaccgccgattcgcataagcactaccattttagtcgtctattaggacaaccccttaaactgatatgattattgtccgacagataacctcaacctagacagtgtcgactaacgtgtactagattttaaagattaaagtttaagcctctttcaaatggcgccactgagcaagctcacttgtgattggtggattcagtaacagccgccattttggaattgtggggtcgtatcggtagtgcagttatggattcaccatccgtcttcatagacaaaacactttacacaggtatcatggcaagtttac

SEQ ID NO: 1371 - DNA, 696 bp, Plutella xylostella
ctgcggctgtactgacggaccatcttcaagaaagtagcacaaacaaacggcagcttattattgatcggtgcacaacaaaacacgtagcgcgcgcgcagcggcagcggcacgtgctggatcatctccgctaagaacttgaacgcctccgtgttgcacatgaagtacagggagtcgtctacggtgcacaggtgcacgaatatgtccatcaaactactcaacgtagcgtgcggcagatggtacgcgtacagctccatctgttccgccgtggggtgcagcccggcctgcgccacggggtccggggtactagctagtaatgtcttcagggtcccgtggtcttcaggcctgaaggtggttacaaagccagtctcccatgcgctgccgtagcggcccgcgcgacctgcaatctgcagggcttgtgatatactgatgacatctatttctttatccccatcctcgttcaccactggcttgactagagaatagaatataattcttcgtatgctcagattgattcccaacccgatagcgtctgtggcgaccatgactttgcatgaattttcagggtcattgaacttattggcttgagccagcttagtgccgggcggcaggctgccgtatatcaccgccacttcatggcccctctgttcgatcgctcgacttacactgtaaatgtcgttcttattgaaacacactata

SEQ ID NO: 1372 - DNA, 696 bp, Plutella xylostella
cgtgatgtctctcgcgaatacaaagtatagacaaaatatttcaaatgtaagtaccaacctaaagattctaccaagaaattatttttacgccatattgcagcctggtattacgtctactccgttgtgcttagaaaatgttagaaaatacattacatatcactctccagcaggccagcccggcgcggcggactcctctcacagtcgatgagctcaatatcgtcctcctctttcctcggcctcaccgtttctcccattacattattcgctgtctttttgtcgtcatccagcttgagtatttcaactgtcactccgatctcatccttgtcagccgccgtccggctgggccggcggctgggctcgtgtcaggtggcctccagctctatcaggtctccgtcgtcatcggtgagactcttctcggccaatcggaagctctctaggaactcgttgaggtcaacgaacccgtccttgttgatgtccatgagccggcagatgtccacgagttgttcctgcgtcatctggttcggcatgtacttgcccaggatctggcacgcttctgaaaactcctccagtgtgatgaagcccgaattgtctttgtccaatatcttgaatattgcttccaaactgcttttgtttttgtacagagtttccacgacggtttgcgtgtcggctttcctgccgtttttagaaacattaaag

SEQ ID NO: 1373 - DNA, 697 bp, Plutella xylostella
tacacacagatttgattccttacaacatacaactgtacaagttattgcggatacatacattgcttcatttttaattagtttatcgtataaaaggagtggcaggaaactttacaaatctattttaaaaataaaagcaacggaaatgaagatcaaaacactcttttataaacttagaccacagcgttgtatcagttttaataaaattacataaatgctgaattggaatcataagtaattcggataatatataaaaaacacgataaataagcaccaaaaaacagattcagtatattgtaatatatttatttctatacaattttacttcacaccaacattgcacataatggagtttatatttacgttttatcttaggtttcaatttatgtaattgctttttacaccaattaagaggtagttttgatagagagatatcaaatttgaagaaatattgctattatacaatatacattattaaagtacctatgtagtatacagttatagcgaatcaaaactcaaactttgtagaaaacagacagccagagaaacaaaacattacaaaacgtataaaacactgtatgcctctttaatcttacctacacatttacaataataataataataaaaacttttatttacaatattttaaatattcttttaaacctacacatttttacagaggaactaaacgaaaatcaac

SEQ ID NO: 1374 - DNA, 697 bp, Plutella xylostella
gagtctaatacaagaaacgtttagcaataaatgattacttaacttccttccaagcattttaaagcttataaaatgcacgaaattatttagaaataatgacagtgtattaactaacgcttaaaattgatacaacctatcatttgtaactggcaccagtaatagcaaataacagaagattaataataaagatcatcagattcagttaggtattatggcagtactcattttcgtttcctaaatacctattttgttggtttacctatctaataaaagacactggtttaacattttatgatatcaaagctgtcgatttttaaactaggtcgatttatctttcatccttttgaccatggatttagcaagacattgcttgtagacgtttttagggcacaaggtatgtagctgaataagatatttttacatctcaacaacagcactaaatttaaagtgtgccttcaggatcgactccattgatttaaactcaagcatcatcatcgatcacccataatacatagcgccgatagatagggatgcgttaatcacggccagtcagcattataaatgccagatgaaccaataaaaatcgcgctttatttaacgtatgaatcccttagaataagcagtcccattccagatacagaaaccccaactctatactgcatccgattcccattcatacattttctcctatggtcat

SEQ ID NO: 1375 - DNA, 697 bp, Plutella xylostella
gtgggtgtggtgggctggggttttgtaggcgtgagtttgtggtcgtccttcacacaggtctccctggccagcatgatctcgggacactccagcagcaggttggctccggccagcgacgtcgactcggtcgacagacacttgccgtagatcttctcgtagaatgcattcttttcttccagtgtcagtggtgtcccgatttctttatttgtgaactgtatgcatgccactgatccatcggagctgcacgccagtaaattcagtccgtcggagctccaggagatgtcgagcacgctgtcagtgaacaggtcgtgcaccaccaccagggggcgcttgagcgacgtgagccagatggacagcgcgcggtccctcgagcccaccgccgcgcagcaacacttcttgccttctttcacgaggatgttgctgttgaagcgtgcacaagtaactgctttgcgatgtccaacgaagtctttatcacatcgccagccatctcgctccaccacctgcgctgtgggcccgcctccattcatcgcgtgcgcggagaccacgtactgcccgtccggagaccacgacagcctcagcacgtgcgtcgtgcctccacattcttcaaacggttctgtgatgatggactcctgcgcccagtccgcagtcttccacactcgcagagatttgtcatctgactgtgatgccaaatactttc

SEQ ID NO: 1376 - DNA, 698 bp, Plutella xylostella
attaccctgagctattcaatattatgtaccatacaaaaataattatatttattttacacagatagggtggagatatttattaaatcttaaatagcttagtttacacctaaattattcttccaccatactactgtcttctacctcacttactgcattcacttccatgtacagcttcccgctccttcgtccctttgccttgttaattaactgcttagggttattaagaataagctttataccttcgttactgtttactcccagtaagaaacccaagttaatgacatcatgaatgcctctcacttgtgctggctgctcggctccactagaaagtatcaagttcttggatttgccaacagcgtggtagttatgagctgtacttattatatttttcctggcagttgtgtccttgatagcggccgagtacataagttcaaagaaaatcccacgttctgcagcttgcctgtacagtttacggctaactttgaaagggatccgagtttccggagcaaatgtaatgatctcaacatccatcgtgccacaagcatactgaaatgcctggagagtcttgggtaacacagctataatgtcatatttcttaatgttttccgactgattaatcttaagagctatgctggcatctgatatttctatagttaccctttgcaaaatattaagtttagagtttctcttaatatcat

SEQ ID NO: 1377 - DNA, 698 bp, Plutella xylostella
ttatcgtaagttaatgggcttacaaaaatccaaatttatattcaatccaagaccagcttagtgggtaggcaaatgttactgtttaattttaaatttacagaagaaaatttcagtgtgaatacgtttacgaaaaagcgttttttatacgacacatagctttaaaataagtttggcagtttgctttgaacacaggtttgagatagtacctatacatttaaatctaggaacgctggttaatgagattgaggatattgaatgtttccttgccaaagctaaaagtaatatacctatcatttcagtcacttcctaaatatttcatggcttactgatataacttgacagaactatttttacattggtttacgtaataggcatgactaatggtttatttaaggctttaatttgtaacatgtatgttggaaaggcaaggtctgaaaatgcagcagttatgttgaataaacctagtcaattttacacaacgcatataacccttactaaattttattttacatactttccgggcattattttattaccattctcgtatacgttacacaaacttaatctttacacccttcacaatacaagtcaaaatggaaaaccagtccacgacagtctcaatactaaacctatatgtacacgaaccttaaaatctaaccttaaatccgtcaaattcaacacaaacttaactttacatt

SEQ ID NO: 1378 - DNA, 698 bp, Plutella xylostella
aactgtgtgtctctaggactaatatttacaagcttctatatcacagcttacaacttactattacaatgctaaaggtcaatggaatcctgattcgttttagcaatatttcaatatcttaaccactagaaacaacatggcaaaaattgcaagaaaacttttgttttcattcacaactgtaacatttacattaactttaaataatgtaattgtattttaataaaacttatttgactgccttcaatgaatttgaataaccatatgtatgaataaagtttaatcttctgtataaaagaggaatgtagaaacaaaatagattattgcaatacaatatagtcattgattcattgaacgcagtacacatgtacatattatatacgaacttgttcaacagctacaatattcacaacagagaaccatgtgttggactaaacattgactgactagtacaaactactgtttccatgtatttaacacattaaatctgtaatcaactatactaaatcaacttataacattaacaataaaaggaagcatcaatgttgtgctatttagggtatacagtacaaatccttccggcacataactaaataaaatttataattaaggatactttttaacaacagtttatagaatcgtattgcaagcaatttactaacttcgaatgatattgatagaccttcaagtcctattactaaaat

SEQ ID NO: 1379 - DNA, 698 bp, Plutella xylostella
atttatatataacatacacaatacaaacaaaaaacaataaaacaggtaggtatacaatataatgtacaaattattactaaattgttattatcgactagatctcaattacattaaataataggaaatgtttgcctaattattaaaaactcaattaaatataattctatttgtatgtattatgtcatgtctggtaacctacattattatttttaagtacttactcccgtgtatcgagactttgaacatcaaaatattagaatgccttgttggttccgtttatgtataaacacaaaaattgtgtcacatcttccaaaaaatatgccagtaattaaattatattgtataaaagttggaagttacaataaattacgattacttatattcaaaccacatcacaataataggtacttaacactagttaatttgtgcatgattataaagttcaagattaatgacatgaaatacagtagaaaaacaatgaatttggcgatttaaaatagcacagatcattaaacgaggcacccggtctgagaatcagcagttatgtttgcaagaaacacctgtagcaactaatattcgccagacactcaagtcagggtcccataagagaacttatggtaaaaacgtgtcaaataaaaactatggtatttcaatgggcacttgtggcacaatctgcaaataatataaattatagatta

SEQ ID NO: 1380 - DNA, 441 bp, Plutella xylostella
tccatttaaacattaaaaattgaatgagattctaacatttacctaactattacaatattctttcgctacattcaaaagtccttaatttcttatatgtttttattatgtatttaagtagataaaagtagcaaaggtttcttttacgaaaaacggccgaaaaaaactgtaaaataccccaaagtctaagaaaaaccattacaaaaacggaataggccagttacactcacaaaatctcatctcggtaaaaacaactctggcacgaaacgaaactgtcctcaacacccccccataaaaatccgggttttatgctgtttaaacggcagtatcgggatttttctccgggtgtttcgcattgccgttgctgatgtagtccccgtggtcgtgggaggggttctccgaccccttggtgtcgtcgtgcgggggcaggggggcctctgagtc

SEQ ID NO: 1381 - DNA, 454 bp, Plutella xylostella
cctgacagcatcgcacaaaacggacgcatcgcattcagtaattctttctatacaaactcacacaagtgcgtccacttcatcggcattgccgacgtcgtttcttcacacatttatgaccatcggtttagtgcgatacgtacgacaccgataggtgctcataacgcttacctaaactaaatattattatttgttggtacactgatatctataatgagagacaatggaggcgatttccaacgctccaactctaaatttaaaacatttattacctattcgaattcataattttttgcgtaatcttccacatgaaatattttaaacaaatataacgtaagtctcacaagaagtagtgtaagtcacgacctcctatttctccattctaaggcggcatgttcatttgtaggttcaagtaggcagaggtggagttgaggagcccaatcctttgcttctgctt

SEQ ID NO: 1382 - DNA, 470 bp, Plutella xylostella
tagcctttcacatagacggcataaaattacaattactggccagagacaccattcaaacaatttgttctaaatcaaaactacgaattaaaaatggaattttgctttaatatcacattttttattgttacttcttcaatttcgagatgataattttgcgagagcagtcatacaatcaacaagatacctataaatttattctgttagatagaactattcatacgtaactaatatttataatagactcaacgtaaaaactgttatgaggcggcccagaaatgatttaaatttaacaacatcgaaagtcaaaccacaaccattgcttaaaaaagtacactaaattacactccactttatttaaaactagacataaagtgtgatcttaaataaaatggcgtgtaaaattgccaaaggccaaagctatctttccaagcattctagaattactggaaattgtatccaagcaattaaaa

SEQ ID NO: 1383 - DNA, 649 bp, Plutella xylostella
tatgaaatgacgtttgacaatgatgtctcgttagttgcacattttgaccaccggaacagataagattgtggcactatactaatgttacgcattttggcatcttctttggtaaataatctcttgttttaaggcacttcattagataatagcttaacttatataatacagttagaacaatacgtaggtaggtaatcgtggtgtacctatcaactttataatatatctatataacgagtatagccttgtattgtataggttctatacaataaaggttaaggcactttgcatttctctcataaatacttttatcagtaacttgatgctattgctagtttgacacaatatgtaatgctaataacttaacggtaacaattctaacagattaaggtagttgttgatgtcctcatcggctagttccacgcggcggtggcggccggctgcagctcgctgctacggctgaaatgtaaaattatgctgttttatagcatttacttcatatacataaacaaattacggattcatgcagtaaaaaaataaaaacaagcgaaatgtatgggcacggactgaggtaacgggccgctagagggcgcctgtaacttagtttaattaactgtagtaagtggtacgtgagagtactcagaaatttgga

SEQ ID NO: 1384 - DNA, 683 bp, Plutella xylostella
gctgcccgaggacgaggaggagaagaagaagcgcgaggaggacaaggtcaagttcgagaacctctgcaaggtcatgaagaacatcctcgacaacaaggttgagaaggtcgtggtcagcaacaggctggtggagtctccgtgctgcatcgttactgcccagtacggttggtccgccaacatggagcgcatcatgaaggcgcaggcgctccgagacacctccaccatgggctacatggccgccaagaagcacctcgagatcaaccctgaccactcgattgtcgagactctgcggcagaaggctgaggttgacaagaacgacaaggctgtcaaggacctcgtcatccttctgtacgagactgccctgctgtcttctggcttcaccctagacgagccccaagtgcacgcctctcgcatctaccgcatgatcaagcttggtcttggcatcgacgaggacgagcccatccaggttgaggagtcgagcgccggcgacgtgcccccgctagagggcgacgctgacgacgcgtcacgtatggaggaagtggattaaaatctcagcttttagccatgttgtaatggtgtttatgtgattgtatcgcgaagttattttgtgcactggtgtacagccaaagactgatttagttcaaagaattccataaaaataaatgaacatgttaacaaattaa

SEQ ID NO: 1385 - DNA, 598 bp, Plutella xylostella
tttgactgacaagactctcaaacaactattagttaaaccttttgtaagttctatggatacggggaaagtatattgatatactgatgtagccttgagagcagctgtatggaatagtatagtaagtacataatatgtagtaaagttattaatatattattttgcgtcgcaaagcacatattttatatgggtactgtaactatgtacatgaggcatttaaaaatgatgatgatttatgatacagggacaatgagatgtattttttgtaaatgggagttatctggatatctagaaatacttctttgagtattgcgtacgcctgaatattttattttatattgtttataaaaattgggacagaaatatgaaatacacaaataacacataactattaaacattatatttacaacaaaatactctagattatagttaggtatctagttaaataatatgaaacatatcgtgccatactcattatatttatattatttacttgtaaataagtatattttttgtagctgagtacaaaagggtacctactttaagtttaagtacgaattaaactatttttataaatcaaggtaatattccattaaattt

SEQ ID NO: 1386 - DNA, 598 bp, Plutella xylostella
attgccgtgcaaagagtttttaacattggtacatttacataatatattttgtagtactatatccaaaagtttaattgtacgaatttattgcaaggttaaaattacacagcgaatttaaattttaacatttgaatattaatgttggttcgttattcatgttatttttgaaccaaaaggcatatttaaatgtaatcacctacacaacgaaaaatcgttaatatgtaagaggctctcaaaacaagagtacatgaaaaacattttgtatagacacagaattctgtaaatggtaaatatatttcaacggacaatatataatattgtatacgagattaacctaaactagatggcacgtttattccagtgtcgcctcctttggtcaaaatttacatatttaacgtttcaaactcaattgtgcgtttaagtgttgactacgatgcgcctttagatattatgtgaataaatttaagtcgactaataaatgaggctcaaatacacaagtgtacgaggcgacacccataccagtcccctaattgacatgtaattacttcactcgaactaggaaccataacagctgttaaatttagacaacaaacataaa

SEQ ID NO: 1387 - DNA, 598 bp, Plutella xylostella
taatctgtgagcaaagagacaagatataacataaagcatagcaaagtagaaattcagccttgcagtttgtctaggcacataccgcatggactctggacgtctgaacatcctctcaatttcaaaggctcgtggtagagtcagcatgggcagcaggaaccacatggaacaccgcactgacgccaccacaaacattatgtagggtgtgaacagtagaaatgcatacagtagcaatgaggcagtctttccaatcaaaatagcaagagttacaatctctgctttgctatcagtttcaaggtctcttgtgttgttactatggaggatagcctcagtattcaaggccaggggtatagcataatatatgataggccaatccaccctccctgtctgagctaggaaagcaaacactactgacaaaggaccaaaaatgactagaactacaatatcacctaaagctatgtatttcagacctattccacctgtgtacaaaaaggatgaggacaatcctccaaaataaactaaggctaagtgttccatccgagctggtgatagaataactaaaggcacaaaaaatgcacatcctacaagatacaataaagca

SEQ ID NO: 1388 - DNA, 598 bp, Plutella xylostella
ttcactgtgactggtttgactaaagctgatcgggcaaacacctgaatcttctttggcatagtagcactgaacagaagagtttgccgttgccctgtgaagtaagagaatattgttctcacatcttcttcaaagcccatgtctatcattcggtcagcctcatccatgcagaggtatctgcacacgctgagtcggaccattttcttgtcgagcatgtccatgagcctcccaggggtggccaccatgatgtgcaccccacgctgcaccgtctccatacactctgacaccggcaccccacctatagccagacaactcctgatctcaggcatcccgcacatcttaagatgcttaacaaaatgttgaataatttcatatgtctgctttgccaattctcttgatggacatatgattaaaccataaggtccctcattgttaatgaaaggcagcttgatctcttgatgcagacagaagcacagcaatggcaatgtgaatacaagagtctttccggacccagtgaatgcaataccaatcatatcccgtccactcagcacagttggtatgccttgcacttgaataggagtaggtttctttattcccttag

SEQ ID NO: 1389 - DNA, 598 bp, Plutella xylostella
ccagcacaaacgccactcccaggtcttcaccattctttgtgtaccggatctcaccattgttcaggtttagtagacagccaatgacatcattctttccaaatgcagagccatagtcatcaaagtttttggcattagactttttgccagttcctccaaacccaaagcccagtttacatgtgcccaggtcaagtcgagctgcttgagtagaccatcccactcggcacaggccttcatcagtgacggtggcctcgtagtagtaggcacccttcgagtggacgccattggtggcgcggccgccatgccagccgttgtggtcccgggactggcagcgcagcccatctggagtcactgcgagcgcatcggtacgatcgaaaaacgacatcgtccagtttgatgaagtcgtcaggatgaccttactggtcttcccttcttgtatatctttcagcgtctcccatactatctgtaggatgggcagacagaaagcgccagtctttccactgccggtctctgcagccatgaggacgtctcctccaccaagaataagtggtatagcttcagcctgcacgtccgtggggagggtccattccatttcatcaat

SEQ ID NO: 1390 - DNA, 597 bp, Plutella xylostella
gtcccaaatacttcaacttcaagctaacagtctctaacgtgaaggaataaatattgttatccccgcaaccagcaaacaaagtttctttatcttcagataaccacaagcaattcacatcctgttgctctacaggtacctttgagggtatactgacttgccagtgaggtttgcccagcttagaagaggttatggaagaccattcatagctgatgatctcaccagcagttccaattataaggttattctcggtggataaaagactgcacacttgttttccagttagaatattatgtatgtgcttcggtttgttgtagtcacttgtgagtaattccacaaccggattcagtagtcggttgagatcaaagacggctatctggccataaatgttgccggcaagcaaatattgcccacatggtgaaaatgcctggctgagaacagtactgtaaatatttttatccaacattttaacgatgaaggattatacttatactgtaaggtttcaaactgtgttttttgtaaatcacagcagctttagaaatcacgttcaaaaaaataaaataaaatgttctaaaataaaagtcaaattagttttgttta

SEQ ID NO: 1391 - DNA, 597 bp, Plutella xylostella
acaaattaatgtggacagtgttaacatgaaaggcgctaatcatccattccaaagctaattttaacttcaatctcaacaattttctactagctacatataatacaaattagagctactaaacgcgctatattaatgagcaataaagttacagggatcatgccatcatttacgacggagagagaaagttatagaaatgcgtagcgtaacttaatcgattggatgttatgaatcgtaacttagtaaatatcggcttatattataccaatacctgctcaagttaggctgttattcaatcataaacataatgtattgtttctttcatacaaatattttattaattctattttacattggtatcttatataaacataaatataatgtgcagtccaagcagtatattatttttgaattaaacacctagtgactttaactatacttctcaaactgcgggctatatgagtctgacttcataaagaaataaaataaatatttaaaaacataaaaaagaaatttcttgaacataagtcaactatagaatagaattgtataattcaagtatttaaaaataaatacagattggtacttaaataaaattta

SEQ ID NO: 1392 - DNA, 596 bp, Plutella xylostella
tacccgtggtggcacatactcttaaagattgttcatctggtttcttgaggtcatcttcatcaaggagttggtctgagtcaatgatgtcatcatctttgcctctgctccatgccgcttctactgtctcatctagcttccatacaccagagttgccaccgagttttagtggggctttggaaccaacctcaaagtttggtttctctgctgtgtaaacatctccaacttttgtaacattcaaaaacccattcaatttgagagagctggatagttctgtggtatcttttagtatcactgtaccgtttggcttgaggagtttcacgattatagataacagactatcactgtgtgttattgaatgaggatgagtccaatttgatatgatcacgttaaatgtggagtgtggacgtgacgattcagtcagcatttccgagttttctagagccactgaaccattaccacaggcaccttgaaggtctttcacaatgttacccagcgcttcttgatcgctcttgttccagattacgaggacgtggtctccactctttactttatccattgtgaatctatagagcgcgtacttttatgttaacttctat

SEQ ID NO: 1393 - DNA, 595 bp, Plutella xylostella
aaccttcctttccataaatgtataaatgtcaagattcaagatatatgatattaacaattactgttttttatgtatattcatgtataggtactgaatacatacgagtactacagtacccgacataataagaaacctattgcccgcaccacataagaataccctaaaataaatagtctctataatattaagcctccagaattgtttatggtttcactgatatccattgaaatttagcattcacttgtaacagataactgatttattgttgatatttatcgagtaattttacagttttttttttgttatactttaaacataactcaaaacataaatctaaagcgttaaacctttcagataacaacaatatcaccattttctaaaacacacacacaaaacaacatgctctacttacagttaaagtagaaacgcacctatattcgataccatcttacaccatttctgcccccaagagacatcaaaaacttccatcagcattctactgaacgcttcgtgttataacttctgaggcacagttaaggtgaaacctatcggatctgtgaatgttgcttgttgcacattaaccgtagatctgtta

SEQ ID NO: 1394 - DNA, 595 bp, Plutella xylostella
cctcgctgaggccatcaataaagccaaatacgacgaaatcaattaaatctaaatactgaactgagcaacttttttgaactattttttttctactaaattattactaaagttaagtatatctatagttaggacaataaaagccaaattgttaagaaatatgtttttacggtatgttgtgtgatatttttaattaatttataatctaatttgttattgtataggttgtgattttaacatttattatgtgcgtacctattggtaatcttccttctgtccctacttgatatcctgattgacaaaaggcaaagcccaacggattctgtacgaaataaaaagtagtttagtaaagcatacctaaaaaaactagttttattcaataaacaagacagttttcaatgaaatattttattatgacaacataaagttattctgaaatattttcaagtatttattaagttagatcatcacagccttaacttgtgatcaggtcttcaactccttatcattgagaccagcatggaaatttcttgcagttttaagcacttcccaaatgaagtaaagtgctataattatcatatttacattggaaacaata

SEQ ID NO: 1395 - DNA, 593 bp, Plutella xylostella
taagcatcctggaagatccgttgtcatatcgagtcaaactgagattacatatttacatagtaaggatatcttaaaagtattaacttgaaactatacctacctaatagccttatgtatttatatggcatgtaaatgcactaatttggtcatgtgtttaaatacttatgcctataaacttttctacacccataaaagcttagttacatgataaggcagtataatgtcagaacttattttgcttacacattattaactttatcatttaggacctgtagttctgtcccgtctatactagcacatacagcaccatttctctctttatgtaattcttcagtttcatccacatccttacctaaatttccttgcaacaaaacctgtatctcttgcaaacttttccctttggtctcaggaacaaataaaatcacaaataaagcaccaaaaaaggtgacaccagcaaaaatccagaacacaccataaaggcctgttagatccttaatagtttgatagcttaaagtcgtgatgaaaccaactatccctccgaaaatgtttaaggatgtcatagcaaccgccttaacgttaatggggaatatttc

SEQ ID NO: 1396 - DNA, 593 bp, Plutella xylostella
taaatcataactgaccactctactatttaaaaaaaatgttgctgctttcctaataaaacccataacatcacaacttttcatttatttaagtatataattatatacattatactgtctgttacgtacacaaaactttataaataatatacagatttgtattgcgttattcatacataagttagacatttaggtactgatagtagccagcttttaacaaaagcctttgattgatcggttaaagattacgaacataaaatggtgttgtcatatcatatttatggcaaagcacagcaccaagaaccggatatcatgtacatacatatttaaaattatgaaaaagtaagatacaattaaatttatatgaccaaaaacaacgtattaggttacgtaattagattttatactaaaagtaccaaaaatcaaatgtgcaacagttcatttattaaatataatgccaccataaacaaggaaaaataatataatatataatctatacttatgaagaaaaataacagtaactgaaaaagcttgcaataaacttcatcacatgcatctcttacatcaagcttaaactaattattcttattattaat

SEQ ID NO: 1397 - DNA, 592 bp, Plutella xylostella
cgtcgcccagcagtgctcgcagtaatactgtaggcaggtcacgttggcgcagaagaagggcgcgaacttggagccgcagcgcgcgcccgcgcactcgtcgcacatctggtcgtcgaggacgtacggcttcacctcgacccgcttgtcgatgtcgccgtgctgcagctgcacgaagcgcgccgagatggccgcgatgtacgactgctggttcgagaacgccacccgccccgcgcctttgggatacttgagctcggggtcggtgtcgatgccggcgtagcacacgccgccgtacagccggtccattatcatcgccaactccacagctttcagcggacgtggcacgccgcccacaaacacagtcttgcgcgggtccagaggcatactagcgtccagcacgaaatccgcatcagccagccgccacggccggatctggaccggcttgtcgcggatggtcggcgacgacacgcagaggtagagcttgtcgtcgtccgtgatgcacgcctccatgagggcagctactgaactctcgtcttgaaacagtaaaaacgcgtaacccttgggcggaaaataactcttgctctcagctttgtgg

SEQ ID NO: 1398 - DNA, 591 bp, Plutella xylostella
tactgccaaaaagcattttcgttttcctaatttgcaaaacccgtactagaggccctgtattacctactaattattttatttccagtgctgctgggaacctataagtccttccataagcatcgcatggcttcacagctatgtatatgcaagcatgttttaaagcttttatacagatttttcttactaacttggtaactactttcattttgtaaaatgtatttttttgtcaatttcaaagatgatttcacaaagtgtgtctttgtaactacactacacgagaaaaattaaaatattagaagacaataaaccagatttcacactgtatctctaagaatgtgatcgcgttcaataattattatacctacctctagttttaaaaagtctcaattctgctactacaattcatgcgattttttaaccatcaatttttgtaaataaaatattattgcatagtaatttcggcggtgatctggggaaggacgcggtagggcgtggtgctaggttcgattctcgtcgtgtaatgtagttgcagttgcataatatcctggtgcagggacataatcagtctcaggatctttgtgaagtattcca

SEQ ID NO: 1399 - DNA, 590 bp, Plutella xylostella
ttcacaatggcatcctcatcatataaggcagcattcaggaaggcgggtactaggaatgataacgcacttgtggaatgatttacttttttacaatgcttcccaaaccagcctagttgtgccttataagtaatttcatagagacatccatctttaccacccataaagatgcgaccattgctggtggacttaactgacatcatgcagatgccgtcattgggcatcacaaacacaggttcaggcaccaggtgcatttcttcaaactcggtggagccatcaggcttgcttgatgaaaatgttacgccaagaaccacaatttcaactgtagtagtcaaaactaggagatacttgacaaagctttggaatactccagatcttggtttgacgaggcccacgctcacaattgtctctcccagtccgtcgaagtaggccacatcactgccatgctcaaatgcccagacatagatattgctgtctattgtaagccaaactctactgatttctggaaatactcccatgagacaatgacattgcatatgggcaaaatgttccattatttcaggaggcagtggaactttgttcacagttttcaa

SEQ ID NO: 1400 - DNA, 589 bp, Plutella xylostella
ggaacttgtaactcgtctttaaatcatctccctgctagtacccgagctgttacaatgtacatggataacggactcgtgtagcggggcctgggccagtagcacggggtgcaatttaagacgttacaaaagttctccgtcgcgctcgctcttaaagctacgcgatataagtgaccgcgatgcaaaacttttgtcacgtcttaattgcgccccgtgctagcccttcagtggccggccctcacgcctgccccatattgaacagcatcttcaagtcttcaatgctgagcttgctagcgccgttgtgccgcgcgcccgtcagcacgttctcggccacctgaagcttcatctcctgcagcttgcggatgctctgctcgactgtctccacgcacatgaacctgtatatgagcacgtgcttgcgctgccccacgcggtatattcggtcctgcgcctgctgctccagctgcgggttccagtgcgggtccagcagcagcaggtggttggcgccgcacaggttcagaccgacgccgcccgcgcagagggataggagcatcaccttgaccttcgaattggggtcattgagctgcgtgatgag

SEQ ID NO: 1401 - DNA, 589 bp, Plutella xylostella
atagttctgggtgattgcataccttcctaaattgcataactaagttcatgagattcgacgtgaaggttttgtccacgctgtggccagattcacctccaactgacatattcaataagtcttctatctttatcttcttctttagagcaatatacaacagcttctgccgaatggtgagcggacagtgcaccattatttcaatcttgtccgatagttcgttctccacgtctttctttattcttctcaacatgaacggtttcaatatcatgtgcaagcgagacagatgcttctcatcaatattctccgcgtggctctcgatgtccttcgagaaccactcgttgaattcctcgtgagagtcgaacagcgtcggcattatgaagtggagaagcgcccagagctccgccatactgttttgtatgggcgttcctgacaacaacagtcgattcctacagctaaaccccaacagcagtttccatcgcatactagccgaacttttgatagcttgagcttcatccaatatcatatactgccacgacactcggttcaggtacttgagatctgacacgacgatctgatacgacgtgatgacgac

SEQ ID NO: 1402 - DNA, 587 bp, Plutella xylostella
atcctcacaaacattctttgactgactaagaagtctcaaacagagcaatatcaacagctaggccgttagggttcagtattggttggtcacaggtactggcaggatcgcttcatgactggcttcttgcgcaggccggcgcgcacggcctcctcgaacacctcgttgaggttcaccctctccagcgcagaacattccactagcgctgctgccctaattttcttttttaacttctttccttcctgcgtggtgatggtctgtgtgggtgacgtcgtccgcaggtcaatttttgtagcaactaagactataggcacggctccgctgaagtgtttcagttcggggtaccacttgagcaccacgttgtcatatgacgcgcggttccccaccgagtagcagactaggaagcagtttgtgtgtgtgtacgacagagggcgcaaccgctcgtagtcctcctgtccggccgtgtcccacagcgccatctccacctcctcgccgtccaccgtgatgtggcccacgtagttgtcgaacacagtgggcacatattccttgggaaagatgtcttgcgtgtagacatagagcaggcaggtctt

SEQ ID NO: 1403 - DNA, 584 bp, Plutella xylostella
ttcgccttgatgcccgatgctgatatcactataccgggtatctttactagccgggatactgtctccgatttcagctctctaagattagaaggatgagcatcagaagacagtagaacttgtatgtcttcaactttctcctctccttctggtcttggtgcagttaattcatcagctaactctttagccgcttcttctagtataggcaaatgttcagtgagtttcttgtaaagtttctcagctaagacctcatcaaagcttgacaaatcttcaatatttagctccagccaatattgtcctaaattataattccgtttcagtgcatctctgtatttgtagttaaagtttcccgtatggaactgtcgaataaattctttaaactttttcttcacagcttgtaggttaatctgatcttgggattcattttcttcgacaccaaaattatcggaaaagaaaacaccggggtcatcaaatccttccattataggttgataatatcttgtatcacacaaaaattgtaatgtatttgtagacagaaataacaaatttaacaaaaacaagcttagaggctttgcttcgtttgcttt

SEQ ID NO: 1404 - DNA, 581 bp, Plutella xylostella
tttacctcatcgcatccatcataagttcacataatttagtaaaaacattactacaaactgtataaagttaacgtgacgatgagaattttacagaatagaataaattttacatgcaaaaatatcgctgtacgtatttttgttttagctttacgtgtctacccatgttatatgtaataacttgattatgttttaagtatgtaggtattaccaccacaatggttacaatcccactcttagatactttctgtttaacacagagtctgttttcatcaaactaaaaacatcgtcatatatcgaaataaaacgcatttctctttatagaaactttcaacaccaacaatcacaatttccatcatagtaatatagttttagctttagtaaaaaacaaattattacaatggatttctttcattcctatcggcctcaattgtaacactgtgttctcaaaaatgattaacttgacttcttacacactcaaggctgaaacgatacacaagtggaaaagttttctacaaaaatgttgcacaaacaagtaagaatactggctatcatttccttcccaataaatatttttctataat

SEQ ID NO: 1405 - DNA, 580 bp, Plutella xylostella
ggattccttaaatatttattatttacatcaatataaattacattaaaacaattacaatgatatttcattgagtttcggcacaataatctattcaggtcaagctagacctaaatattgttttcaaactgaatttacaaaactcttatttgtgtatttttaacttggagaaatattgtttgaccactaagaactgatattcttcaaactgctgcgcatgggccttggtcagtgttgtgtgaaggtctttgaggattccttggttaggtataggcctcacgggacttcacaccactctgccctcggcctttctcttcctggcactgcactgtctgtcctggtctccactcgtgaaaacgttcctcagtttattattttttggcagatacaaaagacacttcttacaatttttatcacctcatttctgataggcttcatcagagaaaccccttaactgtactgtttaacattggtttccttcctcacaacctcagaacgcaaccattaccttttccacacaattcaagatacacacaagctagtccccttagaaaccagtgacagctttgatggccttctcttc

SEQ ID NO: 1406 - DNA, 578 bp, Plutella xylostella
ttgaaaacctggtggaatgcttacaaaatacgtagccagtagccagaccaatatatacgcatttactcttaaacaaaccgtatgcctgctatttaaactacaggggaacaaacctaagaatattttacagttgtgcatgcaatttccgatattagtatagtatgataacatagatttcttttagtgatatcaaatatttagtttcttagatttgtgactctgcacaattcttactttgggttaatgttgagagatcgtttaaaaccgtacaatttttaaagtgaactccctttcattgtaacaattgcgagcaatatactgcaggatttaacaatttatgtacattgaacaccgtcagtaactactacgaattacgaacatttaaatttgcatacgcttataatttgtattacatatagggcttagagaccataatatgatgaatttaggtgtaacaataattattccttccgactgcatataaccttacagaaacacaagacttcacctagtcggtaaatctgtattttcggtttagttagtttagaattttagccagaagttaagtatatattatt

SEQ ID NO: 1407 - DNA, 577 bp, Plutella xylostella
ggctacctttattctatgaatttacacattagtttgcagttataacaaaatagttcagatataaccttatataaattataaaataatgttacagtataagccttgtaaaaaatatagaaaaggaatgagtttgtagcccttctttccttcggaacaccttgcggtgaatgaagtatcgcagttgtatgaaaaattgtgctgttaacagcgctagctacttcttgcccttggtggccttctcagcggctttggtgaccttaccaccaccagcttccttgaagttgacagccttgattacacccacagcgaccgtctgcctcatgtcacgcacggcgaaacgaccgaggggagggaattcctggaaggactcaacacagagaggcttggagggaaccaagttgacgatggcagcatctccggatttgatggacttggggttgtcctcagtagatttaccagtacgacggtcaaccttttctttgatttcagcgaacttgcaggcaatgtgggctgtgtggcaatccagcacaggtgtgtatccgtttgagatttgaccagggtggttgagcacgatgac

SEQ ID NO: 1408 - DNA, 576 bp, Plutella xylostella
ttaggactcagaaatgcatgtagaacgagaaatgaatgtacaaataaaacactccctatccactgctaaaatgcaatgacaatgtttatgtgcccttattaccaaagctttacacaattttctggttttagaaattgcacatgattttgaaatatttataattataatatgcaaacctactaacgatcgctaaattttgtacatttactatgaactatatcacttgcgtatctgtctaattaaattccaagaatatgtgatgaagaatcgaataaatacaaaaataacattacgattacaaaatagtatttaaaccggaaaattggcaacaaaatgatacattaaaattattgttattcgtctacaagtctgtacactaatcagcagaatagcaataaataaattcactatacagtctctcacttataaaacagtcatttcattatatctacatgcttccctgaatacacgatgcgcttcgcttatcacacagataaaaaccacagcacaatttgtcacttatcctttacagagatcgctacagctaagtatgtacaaaaatatttacagttttaa

SEQ ID NO: 1409 - DNA, 573 bp, Plutella xylostella
cgccgtctgacactgatagctgagaaacatctctatgagctaggtcagtgggagatctacttcttggtagttttttcttcaagtcatgatgctcgcacggagcacaaaatgagtgaggaatgaacccctctctccgggagtctgcgagtatcacatacacccagtcattctctctatacaacacattcactatttggcctcttttcacctccaattcatcatccacacacggagcaaagtcatgtagaactaccatcttggagtccggactcaatccatgctctttctctataccaactcgaactaaagtttctatactagctgagccagtgatacggcccatacccggacttaaccctgaatccggtctggagagatctttgtctgaatcaccactgcttgatttcttcttcttgccccttctgattctgacagggcaaaggaatgccatattgtcgaatacttctagaacagcattactggttcaatgtatcttgttttatgtttcttcttcaataaaaaacttttcacacgatacaagatttctttacatcttcaacttcaagcattcaa

SEQ ID NO: 1410 - DNA, 571 bp, Plutella xylostella
tatggggatcagctggcgggacatctgcatcagcctgtataagtttggcttaaatccatgcaagtcctgtgccagtgtcgccaagttgagatcatgtataataacgagcagtccgcccgtggtgcacatcaccatctgccgagcgtctggagtgagccggcaccgcatcagaccagacgcatgaaacactctttggtacaccagattatactccgtataactatttatatcccacgtgtatatactgccatccagtcctgatgtgacaaggagtttgtctttgtgtgagaactctatgtttttaacccaatgtgaatggccggcgagagaccttattttcttttttaagtttcttacatcccacagagctatggtggtgtcgtcagagcaagtcgcgaacatgcgcccgtcaaggaatttgacacagttgacacagtctgagtgggccccattcactgagtagatcctctgatgagtcaacggatcaaatatttgtatggacttcttctcacaggctgccaccaacaggtttccttccggtgaaaattcaaggttgaagactcctccagtg

SEQ ID NO: 1411 - DNA, 568 bp, Plutella xylostella
gctcaatgttaatatattttataaggataaaacaacacttcccatgattagtacaaaataaaattaaatatttgttagtttttttacataggtaaaatgtattttaaaattacagaacatatgaaggactacacactgaattgagataaaatacttagtactgacttcgaaaattatgtaagccactttagtttataacaatatgtacttattgcatcaattaatgattatttggcagaccaaaagagattttccaacagtgcataataggtcattaaacctaattattataagtgaatttggaatagaagctgtaagaaaatctgcaattagactagccactacaccttacataccgaaacatggctaagaacttgaatatgtgttccagcatacaagtgagctgcatacaggcaacaaggggccagcatacacccaaatataaattatttttaagtaatagttcatagatagtaataattttaatatattttgtacaataaaatacaattaagtacaacttgtagcaaagatattaaagagagtaatatttatctcacgtgttaaa

SEQ ID NO: 1412 - DNA, 568 bp, Plutella xylostella
ctttggtttggatggcgtggaactttcttcattttgatttccggttaaacctttcacttgaagttgttccgctgtactaataaacgatgctaactcttcttgcttaacattaacttcaccttggtacataaactgtaataagtctcttaacgctgaatgactaacgtcttttaaaaatactataggatgttgcgtcgggttcattttgaacatttcttgaaagaagggagaacatactgacaaaactagtttatgagcttgcaatagccttccctcagcggctaaagtcacatccactaaatctccacgcgacagcaggccgtggaagcctgctgacatgttggcgtggaaattgttccaacataatgaaaattgttcgtccgacgccatgatggcggcgttacaaaacgaaacctatcctatgaactttgtacttgaaattccggtttgaaacatttaaatatattaatattatatttcaacactgattaataactgtttcatcacacgtcctccccgcttgaatgttggattgtaaatgatgacgcaatgtgacgttcactgtgtc

SEQ ID NO: 1413 - DNA, 567 bp, Plutella xylostella
cggtgaaattatgtatttgtatagagtttttttaaccatagacaagacaagatgttaaacgcttcccaagtattctacgtgtgttaaatacaattaataacgaattatacgaaatacacttttattaaacttaagtgagatagcagacatcgccctgaacactacgataaatttgcgaattaaataaaatttgataacattgtacgtacgcactatacgtaaatattatttaacagtctcaaagtacatacatacaattataaatagtataacaatacgcgagcgatgtctgcaacatcacaggaggccggccgttcaaaaacaacgttccatttttaaataatgaaacaaaaagtttaaacgaaacggccagcacgaaaaagtcttacgaaaattaaagtttgcagtccacactcaatgttgccagctctcgggcaaaatgagatcgaacgacacgagaaaaataatcgtcctgtgtttttttatggaaataaatatgtcttttccatgtcttatccgtgtgtgaagtctaggacgttgtctaaagagaagagttccttgtacaga

SEQ ID NO: 1414 - DNA, 566 bp, Plutella xylostella
gcaaggcagacctcgggactatgactatcagtacaggactttacaatcatcactataacctaatactaactactacaacataagcatcgcccactcgactcgataagcgctcactccggtgctcccggaggctcacataactaaataacttaaatataaaaatatacaaaaatatcatctcctcaaataatcgcaactatacactccggcactacacaatattcgacataatgtacgattaaagccggtttttataacttaaacgagagctcgactgaagaaaattacataaacaaaaaattataataatacaatcacgactatagtgccgattgtctagaactgcctgcggcattccttcatcacttcaagattcaaggtcccctagcccagctaattgttaatcaatctacgacgagctaaattacggaaatgcacggcttcttcggaccgctgccttcccttcgattcataaattacacgttgaatgagagacgttcaaatatttatacatagattcatacgaacaacgaataatactagaacacttatttgtctaccgagac

SEQ ID NO: 1415 - DNA, 561 bp, Plutella xylostella
ccggctaaaacgccgctgtttacataactagagtactccggattaatgcaagccccctcatgtagactgcatcccttgtagatgaacgaggggtcctggtcgtcatcgtccttcacgttgactgtgagtgtggtggtgctggacagacgcttcttggtatcacgggcacggtcagaagctacaatagtgactagatattgctgcgtgcgttcgtaatccagcgtcctgttgacggtgacctgcccctgatgaggcagagctatcgagaagtatccatagccatcttctgcgttgttagctcttagagtttcattgtctcctggtactatgaagtactcggctaacccgttcacgccggcgtcttggtcgactgccttgatgttgttgaatatggtcgtccctattggtgttaactcagaaatggtagtttcatacggagtgtcgacaaagaccggctcactgtcgttgatgtccgacaccctcactatgactggtatagtgcgccttttcttagtcgctatcacctggcacaccaactgaaacaccatgtgcgacagattc

SEQ ID NO: 1416 - DNA, 557 bp, Plutella xylostella
atgttcggaattcttcttccaacaacagaatcaatttaggttaatttagcttaatatttaacataaagatttccaaaacaccgatcatgcgtattttagaatcgttagggaggcgggaagcacaggccaatctgagttagagttagtactagaaataaaattaaagctggaaaagccagaaaaatacaaggttttatacttaaataagatagaaaattggaaatcataaataatacagcctaatatgtgacgtgttggtgtgttgcgaataaaatagctcagatgcttaagtatttgcgttatagcaacgtgctaactaaatatatgtacatatataaatatatctacgaatatacataaatatatacaggaaagagtagtactaagatatactaatgttctaatgtcacgaagttcattccggaaaacaaaaagactgtaacaaaaatgtttttttttaaataattgcactacgaataaacacagattaacacacaaccactatgtgttctagaacgtgacgcagactaaacaaacccactaagttctagagtcgt

SEQ ID NO: 1417 - DNA, 556 bp, Plutella xylostella
caaatctcgagacctgagccaactataccttgtttcacggggaaatacatctgacagaacccttattacattcgaataagggtattttttgtttgtatctttccccgtgaaatggaatatacacaccccgatcgttttgatatacatgtataaaattatattactactatgttttgaatactagcgtaccctccgacaaggttcctaatcaatgacaaccgagtttagcagtttattatacctacgtagtatttatcaataagtcacattatacgggttcgttaacgtgattttgacaggtcccacgttagaaatatatggagaggcgtgaacgcgccgctattaaataaactgtcaacgctgacgtagcaacctttttactattcaaagtgacataacttgtatgaatttgaaagcattacggctacggttggtttcgaacgcattgattatgatccttgtcgcagaatgtataataagctgcctagatgacgtgttcggagtcgatctctccctgttcgacggtcatgtacattccttcctcctcgtacgtaga

SEQ ID NO: 1418 - DNA, 556 bp, Plutella xylostella
ctaaattagtttggtcctgtaataatattaggtatgtataccctatcttacttaggtaggtacctatatcaaacgctaactgcgatgatttatacttaactagcaacaatgttatataacattaatattgcaataataaaattatatcatatagctataataaagtttacccaagcaccgcaatatgatacagtcttcggcggggtctattcaataataagtaaaattttgtaccgaataaaattaatccttgtctatttggcacaaaatttcgtaatttatagcaacaccaaaggtttattgcatttttattacccgccttaatttctcgacgctaaaactaaagatctttatcacgatattccttacatttaatgtaacaaagtttattaaactcggaacttttaaacacattaatattattaatctctatcgataatcttacacttactttttatcttacaacataactttttaattatttacaggacgcttaacatttaaaagttcatagaacgtactcgaaatatatcatagatatatgggataaacatta

SEQ ID NO: 1419 - DNA, 555 bp, Plutella xylostella
tacatctttgatacgttttcgtaaaataatagtacctatataatatataatgaatgagtaggtaggtatattgtgacggtggacagtagctaaaattatataactcactcaaaatttatatgattatacctaaagctaacttgagttttatgctataagttgtaagattgaaaaataacataaattctggaatcctctaagtcaattgtgtaagtacctatgtacatctagattacctattatcgcaccaataaaacatttcattatttactcaatatacaatttaagtagccaaagaaacctctataaatttattccaccatcttgacaaataaaacattatttcatacattcaatatttcataagtttttcatccaggaccaaatcattattgctctcaaagttactttaaagcatagcattggaatacaattttctaaactacatccctgttgcaaactgaactttaccactaatcaataacgtacatattcgtgctcgtcagtttgcagtacaattgagttagcctttacttctttcagtttgtttcaatt

SEQ ID NO: 1420 - DNA, 552 bp, Plutella xylostella
ttttatcattgaaataacgttttcatagccattgtacggcgtacctattgaacaacaaattattatcagtcagtacattatataattaggtatagatacctacttgttagctaatatccaaaataactgcatataaattgccatgtcttttcttatcttcctaaaattaccacaaagtatgattaattataattatatacagcttagggtagatgtgtgacattattttaacttaatttcacaataaaatataacttcttacgtaatctatataatatcacagcgaccagcgaccgatcgaagcggagtaggtacttacgattacgtaggtactactaggtaccctaggtaggttacaagttattcccgagcccgaggaaagggtggattgtttactaagttcattaaataacataattattagtttgtttccattttaattaactaattgcatgtccgttgtaatgttattttcagttcaagttacataaattacttacctaaaacctaggtaggtaggagaaatattttatatacttacttataataata

SEQ ID NO: 1421 - DNA, 552 bp, Plutella xylostella
ttccatcagagctgcttcctcatcatttccaaaccctccataatcttcatctacatagtctgtggcataataagacctcttcttcttgccccatgcttttgtatcaggcaagtcatcatctgacttctcttgaccctctacatcactatcagcaatttccaagtccttgttatctgcttcatcgtcagattctgaaaatgcatacatttcttcctcactgtcagaaccatgattttttcttttttttaccttctcgagcaactttttctctcttgctgaatattcatcttccgaatcggatggctcatagttgcccctcatgtcatacttggatccaattcttattttctcagccattctttaccgaaatttaaataaatccggacatgtgggtgcagactgcaggttatattttttttgttagtgatagtttaggaaactactatgcagtatagttctctgctattacagatgtgttataacaccacaagtagcgctgaacaccttttatattacaaaattcacaaagaaagtgaagcgaatactgctgtt

SEQ ID NO: 1422 - DNA, 551 bp, Plutella xylostella
gcgtgtaagatattattattatattttatgtatgagctcatttatatccattctgaaggcacaaaatcttaatttctttgtttaaaactcgtctctatcactgtttatttacatttaatttttaaatggcagaattgtgaatctacatcattgctgctgcgagtttcacttcgccctaaaatattttgccgtgaaaaagttaatttacgtatatctttccaaactttaaaaccaatctttttactatacaactaaccttattacaggtttcgtcaaccgctctactctgttccatcaccattctctacactctctacgcagtagccgagtgcggatggtaagtgatgacgttgtgttggtgagtgaagggcgtcccaccggcaggttccacagacgcggggagctgtagggcgcgggcgcggcctccgagggtgcagcgggtgctgactcctgactctacttccacgggaagggaggcgtttgttaatgcggtgtatctgttggtcagcacgcccactagttcgcccaccaagtcgtctggtcccaccaga

SEQ ID NO: 1423 - DNA, 545 bp, Plutella xylostella
cgcgcgtaggtgcgacagagacgaacatacttcctccagggactgctgcgatagagttgagcatacttcgtccagggatgggggttggggctcggcggttttgttggtggattctggaagtagagcgacgacatcccgcactttgaggtacgatatggccagcctcataatagaggccttatccagttgctccacatcttccttcctggcaggcagagctgctgtgagctcggagaatatctggacttccttgttgcgccggcagcgtgccgccacgcgcgacttctccttgcgcttgtcattatttcttctcttctggttagctggttttgtagacatttctgtttttatcaataaaacgacactattatgaaaccttgcgatacgtatacaatctcagaacactgccaaggatagtaacatatcgcattccacgggtcgccagggtagtctttcttgtatttgcaccacgttatagtctcacaaacacaaaattaaacacattttacacttcacgaaaataacactttgtgatcttgttcact

SEQ ID NO: 1424 - DNA, 542 bp, Plutella xylostella
ctacctgagtccgaggcttcacatgactgtatatgaggacctcattcgcattctctttgtacttcttgataatctcttgagcattccattcataagcgtgtagcatcaccttggcaagtgaaggtgtaatttgaaggctgttactgagtaattcgattgattcattcaataacttctcgacttcctcaactttaaggcacgagtattcaaagtattctggatcggatttgctcttgtcaatagtatccatgtcgcagtcatcattttccccgtagtaatcatactcatctccatcgttatccgaatattccatatcagattccgcagacattttgtcggacaactattcgatttatcccgaaaatcccaaagtaagatattgcacattacactaaaacattgcactacgaagtaattttttaatggaagatattatgtagtaaaaaccatagttaaattatgaagatcataataaattaagtatagaatacgggaagtaaataaataaatggtaaatgaattcagaaatcacaacgaaacga

SEQ ID NO: 1425 - DNA, 538 bp, Plutella xylostella
ttagcagtgctagtgtttctctattcgaaaaagcagaatttatggacaaattaaaaacttggtaaactagaaggtcaaaatgataccataatacatttcatcttagtatcacagatatattcaagtcaatttacacaaagtaggtacacaaatctccgttaaattcggcacctctccagtccaccaaaacactaaacaattttcggaattgctggaatatttcatttccacttcatttgttttgtctgtggtcctctctggggatatatctccgttgtctatggtagtcgggtctgagaagtggtgttgtcctgagccggtggccactataggccggtatggatgtatggacacactgttgcaacagtcggagtgtagaggaaacttaaaagatgcattatcagtttctacactcccagtatcgatgctcgaagtccaatcaactttgttcacgtcccacaccttcagtataccatcagttcctcctgtcatcaggtacttgccacacggcgatatatcgaagtatactctctggtta

SEQ ID NO: 1426 - DNA, 534 bp, Plutella xylostella
ttggagtagcgctgattctgattgatcggttctgttctttatttggtgttggagttttacttttgatttcatgtatgtcatcataatccacatccatcccatcaaatatgtcattgctatcattattgaatggctggtctctctttaaatcatttatattgttgctatgtggaatagaccttgatgcttgagaagtataagatgttgtagatgatgtagcaaagccactgttatcagtagctgtcttgaatggtggtgtccatggtttatcagtagatttggtcttgaaagtgaacttggatgactttgtagcagcaggcttagggctggatggagaggcgttgcgagaatctttactatttctcgtcacaaagttagccatcgaaaattgtttggtaggtttcttcgaagccatttcattagagatacttaatacacttatggcttttaaccgatagaaattgttcgatgtcttatttgtagagattttctaaataaactcaaattatcaaattccggataaataaagttttt

SEQ ID NO: 1427 - DNA, 534 bp, Plutella xylostella
ctctcccagatcatgcggtgtttctgcttcatgtacgctttcctcgcgtcaccgtaagcaccaagatcaccatatttgatgaaccatgcttcctctgcatccttgtatttctctagaagaggtttgcaaactgtcaggtggtcgggcctctcgtacatcatgcagtcctcataacggtgtcggatgatacccaagatctcagagtcaaccattctatcacgtttgaactgtagatttgcttcgaagtcacagacaacatcgtcggagtggcattggtcgatggtcggtacgcggcggaactgctggtgataccacggatacttcttctggtttggttccacaacagtctctctgaaccatgtcactggagcatccacagttctgaacactgcatccataaaacccctgaaaacattgttatcaccttcctccgccaccattttcagggaaaaattgtgaaaattgtaattcaagattgaaaaatcaagaacaaaatgttgtgtttgacatttgtatgtcacgatgacacaaaaa

SEQ ID NO: 1428 - DNA, 533 bp, Plutella xylostella
atatgacagaacgtattataaaagttgaaatccataatgtatatgttacacaaaacaactagttcttggtgggctcgatcgtttctcctccttgaatctgtccccagccaatcaatcgccaatggttttcaactcttctgctgagcgcgactttctctccgatttccgtgcacacagggttggtgagggtgattttggccaaatcggccttcgtggcgatcacccgcccgccagtactgagggagccgatgtttactagcaggatttcgttcctggtcaatttctgtactttggccgctttcttgtctccttcagtgcggactccgagcaacctcttcagcagataatacgacacttcgagcttcacgaagattcctggcagagcgcccacggccccgagaacctgtccaaccagcctatcagcgcggcacagcgtgggctcgatcttggtgcccactccgatgagtcctccgggcaccgcgtactgcagctcgttctgttccgcgaatagcgacacaatgcgcgagaagatc

SEQ ID NO: 1429 - DNA, 533 bp, Plutella xylostella
cacccactcgcggtgacccttgtacgtcttcacgcagtagccagtagccacctcccacgccttgatggtcttgtcccgactggcggagtacacaatatctccgctgggagagaaggccacggacgacacgttgtggtcgtggccgtgcatcgtcttcacgcactcgaacgtctggttgaagtcccacagcttgatcgacatgtccgcgctgcatgataccagcagcttcccgtggtggtcgaaggcgatgtcctgcacggagtccgtgtgtcccttgagcgtgcgctcgtactcgccgctctcgaagtcccacaccttgatggtggcgtcctcgctcgacgacaccatcaggctgaacaccgggtggaatattaccttggtaatagtggcgcggtgtccggtgagacagaacttctctggcgggcgcgggatccactcggcgggcgtgcgcttggcgcgcgtcggggcgccctctatgaactccttctgcgcctccgacaacttcgactctagctccatcaccttcttctgca

SEQ ID NO: 1430 - DNA, 525 bp, Plutella xylostella
gaccgttggcggtgagctccaaccatttttgtttttttcaaaggagtcttcagatatgaatgaaacctttttcgctgatgtgagtgcgctcggccgcgtgcggctgagggtgacggcgcggaggtccacctgcctcatctctttcaatacatccttttcgaagtttcgaagacattcgctcagactttcttggcatattgttgcgtcatacgaagcctcctttctcttcacatggttggttttctcaccgcgctgctttctttgcttgaatagactcgcgtaacgagacgacaattggtttaaactaactaggacctggttttgggtgtttatagaattcaatgaaaacatgttacatgtaaataaactgtgtttttcttcaagtgcactcgaaaattttgtaggctcttacgtcaaacagaataatatcagcaaaatatggcgaaatgccaataaaaattgttgagtttcgtgtcacatcactatcaccagtcacgtagactttacacagagtattttttcaag

SEQ ID NO: 1431 - DNA, 524 bp, Plutella xylostella
cagccagctggtcctgcgagatgttcacttcgccccggtacatgtagtccatcatggctctcagttctgcgtacttcacgtcttttaggatgattattggatgcttgtcgaattgttgtgacaggacattctcgaagtatggactgcacgcagagagcacgaccttgtgcgccttgagcgtctgtccctcggcggccagcgtgcagtccacatgcatgcccttctccagcagcgtgtcgaacaccgacaccagtgtggactggtggttgttccagcgcaggcagaactgctggtcgtcgtccatgatgctgccgtgtggcccctgtcgcgcccgcccgcttgactatttcattaactaaatatctgaacttttaagcagaattttcactgtattatggattatcactaacttaattatgctttaacacacccgccagctttcttgaacaaaaacatctactttgctatgcaagtttagagaaaggcacctctaaaaaaaattaacgaagcaagttggaagcgac

SEQ ID NO: 1432 - DNA, 520 bp, Plutella xylostella
tgaccccccaggtcattcgtaacttcgaggttagtcaataaaaaaagacctaaccaactctaggaacattatttcggattaaattataaaaattggcaatacttaatgttcgctctatataataggggaaattgactattggttagatctccttgggattatctagattattatcaggaaatataatgatttaatacacacataataaggaccaatacagcgtccgactatggcctcataacaaaatgcacagtaaacaaacattcgcccaccaaagtcccactacttcgatttctctaataagtatgcaaacataaaaacgagatcttattgtaaaaaataacaaaattcgattccaacaaataatcataacggaagattttttagtccatcagactttaaagtttacacattttcgtagtagatatcatttggcaaatatggtaggtaggtccttcattcagtttcataacacgatgaaggaatatctaattatgcagaaaaatatctgtacaaattt

SEQ ID NO: 1433 - DNA, 515 bp, Plutella xylostella
tggccttggagatgtccttgaacttgttggatacatgaagtacactgaagacagcaagatcagacacagacagtgattctccaaccaggtaggtaagtggactgagggttttgtccagatattccaccgatttgggcatttcatcctccaagatcaggctgaaggagagccagtggttcattgtcactttctgcaggggaccggctgacttgttgaatgcattctcaagcaaccttatcaaatcattgctggttccatatgtcactggttttttactgtttggaagcgtcacggtagattcacttccccaagccacatctatgctcttcgacaaggacctgtagagttctatagctaggaaaccacccaaaggcgggttagccttgttacaggttattttcatcgtggtctttcttgtgctagaggtttttagttatttcttcctcagaaaaggaagtaccgcccggaatttcgagcacacacacgaaaaaggaaacgatgcagcgtgaacagct

SEQ ID NO: 1434 - DNA, 514 bp, Plutella xylostella
gccgatgtcgcccgtcgctgagaactttactccttctttagtgcatgagatgaccatggattcaccaaactgtgagaggtcgcggcagatccgcgcgaactcagcactcggcaggcggatggtacagctgtattcagtctcagggatacctaaatgctccagatctaagttcataagtttcatctcatagtcagacactttctcctggttggggctctcgaacacgaatgtgacagtgtcagcgttgtcctgcgccttcatggtcaccgtgtccttgtcacccgcacacttcaggatcttggacatgcttcccaagttcattcccatggagatattgcggtcacaccgatatttgtcaaaaccatcagctcgaagagtcagggacaccaaggaaacgtgagagttgtccatagcctgaagttgaatcccattgtcatcacaatcaaatgtagcttgtgtgaggagatctttgatggcttccagcaccttcttgaggattgagcttcggagtaat

SEQ ID NO: 1435 - DNA, 511 bp, Plutella xylostella
tttttgcggtttttttgtgttttttattggttttagcttagattaagacctaggaattagcttgaagacttcaggtagtctttgagcacgtccaatgctggtgtctcctcaccgaagtccttgataactacgcaagagcatccgacgattttcctggccttgccgtctttgtcgattttgcaaagtccggcccattcaccgagcttcttgttgttgtcgaccttcacaagtgggatctggtgttcgttgcagagagcctggacaagcttcttgtaggcagcctcgtcacagttctcagcaagcacacaaaggacagcttgcctcttgtcaagagccttagcggcctcgtggagtccatggacgagtcctccgtggataagggccgtcttcagaacctcctgcagggctgtgttcacgtccatagcacctccgctcaagacggggttggcgggcacttcaacttcgacatcagccatggtttcttgtgattagacgaccttgcgtaccggaa

SEQ ID NO: 1436 - DNA, 511 bp, Plutella xylostella
cctcaacttattgacaaattttgaaaatcacagttatttatttttgacatttctgttttgtgtaatcgtgttactattacaatacaacaggttgtcatgtttatgggaaaatgggtacaaaatggtgtttcactttaaatttatatattggccacagtacattatattattgagtaataattacattaataagataacacatagatcggattcactcttttaaaaatcatcaatcaaagccttgacagtgacacgataaaaggcgaatataatactaaaggacaaggtaatagggttcagagctacataacaagtgagcaagatcgaggcgagaacaaaaccgactaatgtttttatcacgaagcaaataaacacatcaaaaccactagagaaaatatacaagtgaacaaattagttatattgtgatagtaaaaaagcacgaatgtgtaagaaacaggtaacacaaagatgtcgggaaacagtttttatggacataaaaaaaatatataaa

SEQ ID NO: 1437 - DNA, 504 bp, Plutella xylostella
ctcaaggcaagccctgcttcatattggttttgagcattcaggtctttccgtatcatgttggtggtgagcataagaagttcagagtcagcgtgaaatgattgactagcagctaaatatccaattctcttatatgtaaatttgtttgaactcattacttctataatattaaaaatagaccaggatatgtcgtatcccagcatttgtaaataggtgagttttgcaacggcattagctttcactgctatgttatcctgccttaattcgacttttatttcttccatacactgagctatgtatttcgcctcgttatctttgttatttcgaatccctcgaactaaatcactgagatttttgtcgaacatcctctcaaagttgcctttcactttttttaacgccattttcactaaaatatagataaataaagaagttgtacatgaactaaactaaatatttatccattactgcagtttttggaaaattctacgatttttctgactgaacaat

SEQ ID NO: 1438 - DNA, 501 bp, Plutella xylostella
ctcgggtcacaatgccctccacacatattaagtttcctagatatctggaagtcagactcctcggagtgacatgtttgtttccaaagcttccagaaaaggcgacgaagaactcttcctgttccttagcgtacgttggatcaatggacgctacatactccttgagcgctttctggaatgctatctgctcctcaaaagcattctcaagcaaattttttgctctatccggattcttccttctaaggtcattcacactcaccataagccgctgagacttatcagcgatcatttgttttactctctccatgtaaatgccttggtcttcttcatcgtcaaggaattcaagatattctctctgtaaatctctgaggcgctggtcaaagtctccgtcctccattataaataaatttttagtttaataaaacacaaagaagacgatattttcacaaaacaaaattgacatgtgtaccggtattttggcgcgaaatttgttgttgtcaattt

SEQ ID NO: 1439 - DNA, 501 bp, Plutella xylostella
ttgaatccttaaagtcgatgatacatacatacttagagtattagtatgcgggagtatattaaataccttgtactccctaataatattgcataatcattatatcaagataatataaacgactacaagttgttgtgtatgtaacacatacatactatgaatatagacacaaagtagacacgaactgcagatctgactcagacaacgactatgcatatggtttggcaggctatacgaaatgctgaactgttacgttacttatagacatacatattatggttttgctttatcatatctattataaactatagttagacattattgaaaatagttactgaatcggtacaattataattatttaaaatacgacatcataattattacaaaaaatgacagataagaattaaaagatcaataaaactattatgaatgtataaattaattgaataaaaaataattacgcattataattcaaatcagaattgaaatcagttttcattaaat

SEQ ID NO: 1440 - DNA, 598 bp, Plutella xylostella
ttatgcccaacatgtactcaatatccaggcacaagttctccaaaccgtaaatccagaatactccaataatttcagcaatagcacagaaaaggatgaggaaagttccaccgaagtaatccaccaactcgaggatgtattgaccaccaggtgtaacgtaaatgaggccgacgccaaatccaatagtgcagcagaaggcagacatgaagatagtcttgatgcgagggaacgcatccaacatcacagtgttgatggtggaaagcaaagctacagctgatccaatacccagtaccgtcatcatcaagaagaatagtactgcgaacaactgtggttggaaagttttggagatggcgtcagggtaagaaatgaaggcaagtccagttcctgcagagcctgtcacatttgcaacctcggtgttcaactcgtgcgccaagttacccaggataccgaagatcgtaaaaccagacagtaaactagtaaacgtgtccaaagtcgtgacaatcatcgcgtctctgtaaacgttttgtctgaagccgttgtaagaagagaacataatgatagcaccagtgcacactgacagagagaagaacacttgggtcac

SEQ ID NO: 1441 - DNA, 598 bp, Plutella xylostella
caaaaattgactattggtgttatgtgtgaatcaaactgtaggtactactgttcaggccttcataaataaactacttgaagcacgtattacgatcaagcctgaacaaattaacttatattgttcggtgttacaattacttgcccagctgcttgatcagcatgtcagtgctgagagacttgggtcgctcgatggggaggccgagcgcacgagaccagatcagttgagcgaggacgccgagagcgcgagacacgccgaacatcaccgtgtagtagttcatctccttcagtccgtaatactgtaagaggactccagagtgagagtccacattgggccacgggttcttgaccttgccaagctctgttaggattgggggcaccaccttgtacacagcagcaaccagtttgaacagtgggtcattgggcaagtgcttgagggcaaattcacgctggcatgtgtacctggggtcagtcttcctgagtacagcgtgaccgtatccgggaacaacctgtccggacttgagggtcttccagatgaactccttgagtccgtcctcggtgaagttatcgccaacttgtttacgcagtttctccaaccaaac

SEQ ID NO: 1442 - DNA, 598 bp, Plutella xylostella
tttttatggtacctatatacaaatgaaagttattactatgttgtaattaaatccacaccagctaagaatatgttcttaaaaacccaatatttagttactcattctagatacagttcagtcacgcaaacttatttgttgaataataataaaacatgtttaaccgtgtttacgtctactttctgttaatgcattaaaaagttttaatttgaccttaaattacacatccctaatattatttacatttaatttatctgtataatgtaaaaaaagtccaaatactgtacctattttgaataataatttcacagacttacgttttgtttatattgtgaattattttcttgtgccttcatactacgatcgtctttgttatgtacctaagtattagattataggattaaaagggactagtttatcaatatagagaaaagacattacataagtgtgttgaggattatgttggtaacaccaaataatttctttgaggatgatgttttaagtggaaaaacctttgaaaagggaatcaaatgagtatagagattgcttaatgatgcgctctagtgacaacattaaacgaagactcgtcaaaatcatgaaa

SEQ ID NO: 1443 - DNA, 598 bp, Plutella xylostella
agttggcctgggggattggtaagttttaaaagtgcaaaatttatcttagttatctacttcatggtataaaatgaagtctaccactagcaataaaagtatgcatgtggtaagcattgttacttctgcaagttttgccatagattattgaattccggaagtcaacctctgctacttttaattccagtgtaaaccacccatccactttattcatttcttacccttcccgtagccaggagaataggtttcggtgcatgacactcaacatcctctggagtgggttcagcgaggatgccactgattgtgtctaggagtggattgccaacgatggtgccctgagtgatgttcaaaagatttgcaccatcaatggttcctgatgcgaaactgtagcccattccgggaacacagcctttcactggctcagactgatcaaaagttttggtgactgggtcgtatctggcgacagtttcttctggcatttcaacaaattgatgaatcaccgccaattgactcgtcaactcttcaccgggggaattcaaagcttccagagctccattgtaaaccttggtgccaatgattctggtactctcaaacatgtcat

SEQ ID NO: 1444 - DNA, 598 bp, Plutella xylostella
aggtttacattaactttgtataattagacgaccaatacaaaaacagcattaaaatgacattaatctaaaacttaccattaattgaacaacattattataacattccaatattttgtactctttaaaatgtgataaattacaaaacataagacaaagatggaataatctcacaataattactatgtaaattacttattaaaaccttacaaaatccatctaataataacaattataattaaaagtgatagcaaatgttgctcaatacgacatctcacaaaaactatcaggatcgctggctcagctccctcggccttctgcatcttattattataattgatctattaattattaaacaattcatattaaaggaaaggtgagaaaactaaatgtcaaaagggtttcagagcaagcaattaactaaaactgactataggaagacagatttcctagagacaaagtagcaaattattgcgtcttaaaaataatattaaaactaatacgcaaaatgaaaataacaatcttttattggaatgtggggtactggactatgtttttggtatgctatggaggttagtggaagtaatatcatgatttgatt

SEQ ID NO: 1445 - DNA, 598 bp, Plutella xylostella
tgcgaggaggcatctcttgaaaactgaaccacaaacttgtttgcagtataaatttcagccagttcattgcctttgatttgatctttactcttgacaatagccaacttggcaaggtcgtccagataatagtcttcctgttctttgccaaacttgtccaagaactttgctgcatgttcattgtggtcatataatataaggctcaaatacatatgcacaaaaactggatacagaagtgtagacaactcatgcttataaacatccaaagaattgtctataaatttcttgaggctatcataagcaaactcgtaactgtatggatcactttcggtatgatgggatgttaggatgctggctaattcgacttctggcagatctaagtttccaatctctgtgtcacttaaactggcctctttacgtagaatctcttctgtgcccttcaagttgtattttcgaaggagttgcaaaactgctaggaggggggtggatttctcccccattttactgaattattcctcgctttaaaagaatcctaaacaaatacaattcaattattcaacaaaaaaaactattatagaaaatgcaaacaaacgtaaataat

SEQ ID NO: 1446 - DNA, 598 bp, Plutella xylostella
atgcctatttagttgtttccatttataataaatatattaaatgtatatttaatacacattttattcaaaggattacagatccaataatccacttcaaattcacaatcaattgatatttccaacaccaaacactcatacaaaaaatattcacctaataactagcattactattcttttcttccataggtacgccttctttggtcatcaattttctcgaggtagtaagttcctgggaacagggcagcaatgggcccagagggctcgtagggtgccgtgtggtagttcttggtcctcacatccatcaggtccgagaatgtttgaggtttcacacattccctcttatctattagagatattgagtcatgaagtgaacttatcaacctttgcaacttggaaccagcactcacatcattgcatatctgtatggagtacatggtggatgatagccctgacccataagagaatagtgcaaatttcttccccacaagttcttcaggagatttgctgatcaggtatgaagccagactgccatacagggaggctgtgtacatgttccctacattacgagctaaattcaatgaaggtttagtcttttctt

SEQ ID NO: 1447 - DNA, 598 bp, Plutella xylostella
ctgaagtctgataccaatatttaacaagcattttactcttgtcatacaaaccttcaatatgagaaagcgtcactaggaagtcagatgttagaggtgttttgatggacacattataaagatattcagcttgttcaggggacagctggaaattgtttacaaatgtattcacccaaaatattttcttttctgtttttttgctatcatctttaagccgcgtagtttgagagatgaggtggtgagtttttgttttagaatcattcaatctgctagacatatctttaacagattcatcaagagaagatatggtattcaatagtatattcagtttttcttttactttattgtattctgtaagaacggctttatttacaagcatatcccttttttcaatttcatttattaatactcttttggtattattggattttttcaaacaaagtccagacaaggtattgagagcttcgctattgtctgtaatgatatgactatcaaatattttgttaatcttcttccgtataggattggtagtataaacagactccatagtacacactgaagatggaattataggaaatttaaagaaatcacgattaaaaat

SEQ ID NO: 1448 - DNA, 598 bp, Plutella xylostella
taggcgagaaattagtagctaatgctgagttgggcctctcttctcctgtatcaaggcttctgtggtattcctttatctgacacacggcagcatgaaagttaaacttgtgatcgtcatgttcaatcttttccaatgccttctcggatttcgacagcaattttgtctcaacaaacgcttttaggtcggccattttcatcttccgtttcactttctcactcgaccgtctcacaataagtgggtcttcgtctattttgacggcggcggcgaaaggggcgtcggccactggggatatgttggtcagatctggaacctccatgaagtttttcagcgaatctcgtttcttcatctctgggctctggtaaatggagacttcgatttttggaatcggcagcgagttgcttctcttccgcgggagcgtctgctttgagatgtcgtcgcagatgtcacgtaatctgttgtacaaatagtgcagcgcccaataaacgccttcctcttgccactgcgacgtgaacagacatctcagagtagccacatctaggaatgttgcagccgaaacatgattttgtttaggtgaagatggtttttccatagtaggaga

SEQ ID NO: 1449 - DNA, 598 bp, Plutella xylostella
cgcgcgtctccgggacaaatattatcacgaaaaacaatcccacaaaacaaatacacccgaacaaccaaaacgtaccgcaaggaccgatcccgtccaagatattctggaatgttttcgtcaccgtgaaagtacacaaccaattgaaagcagtgcatattgatgcggccggacctcttatcttcgccggcaatatttcacccatcatcaaccacggtatcggaccgaaccctaacgagaaccctaacaagtacagcatcacgctcgtcagcggcagccagcccaggctagagacatccattttgtacacatctctaacgtaaaagaatgtgccgagtagaatcaacgttaaagtcatagttacagaagaaaaataaagtagaattttacgaccgactcggtcaataatagccgttgctatgaatgtggaggcgaagttcacgacgccaacaatgatggttgacagatgctcgtccaccgagctgcccgacatctggaagatctgcaccgtgtagaatattaccgcgtttattccggacagctgctgaaacgccattaaaccgatacaagttaatatcgatttcatataaattcttgaaaa

SEQ ID NO: 1450 - DNA, 598 bp, Plutella xylostella
ccggggaccgtggtcacgtctgacacgtttatactgtccactatacatgttgtaatgggcacgttgctggttattgtttgtctaactagttcttgagcatctaaaacagccttctgggatagtttctctccataaaccgacaaatttaatgtgcaccctttgtcagtaacttttgaacctatcggacacacaacactatttggcagggctttcctaatcgctgcattcaacaaatgtacaccagtatggttcctcattatatttagccttctttcagtatccaatactaatctcacttcactttcacatttcactgtattatttttgctattagttaattgaaaggtacctttgtggaaaacaaagtctttgattttgaaaaccgcttcgacatttaatactgtcttttcattgataattatagtgcctgtatcagcgatttggccgccttcttcacagtagaaattggtatcctttgttactaggtagtagtgtttgttttcgcatggttctgtattatctatccaatgtccatcttcattcagaaatgcaactaaattggtcttcaatggttcgatgataagttttttgtcttcca

SEQ ID NO: 1451 - DNA, 598 bp, Plutella xylostella
gttggttgtggtagttgtaatacaaagagcctattaacaacctaggtccgagatggaaggcaatgcagatcctccacacgtatctttgcgggcttatgcccgttatagcactaattgacggcaccacattgtaaaccctacaatgtgtttcatgaatatcgtcagcttggaatatggacgctgtcacataacagaagactaatgcgcccagtggaagccaaagtgccgctaaacatatccgcctcagttcgcacttccatagaagaccatgatactccaatgtggagactctgctggtgacttctccgttctccacagagggccgatcattcgccccctgaccctcagcatcaggcaacaaccgctccggttcatctacttgtatcatctttcgagccgtaatcgacggtcaattacgtattcaatttcatctcagttccgacggacgaaacattgtttttgcgtttatttagatgtttttaaccgtaacttgaatttaaagccgcacattttactgtaaaacgaagtggaattgatcaagttttatcggcacttcttttgtgaacgtaataatagaggggacgatgttgaaatgtgt

SEQ ID NO: 1452 - DNA, 598 bp, Plutella xylostella
tctgtttgggatagcttcagaataataagtctaatataatcaaagaagtctacatgatatgtacgataatacgatgttcactaagtctactatagtataaaacctttatcgcacgttaatgtcatattattgtaggtaaagtatgtttttaaatacataatatattacccatatactacttcttaagtttttgttgtataggcgacaatataaattaacaacaacatttagtcaaaatacaatgagagtatttttttttatcagtaacagaccttaactaggtaagtacataatattatgtagtaaaaatatctcatgtcagtattataataagtcaatgcccatgtctattttaatgtaagtatatgtaatactgaaaatcaatcgagacaattttaatcgaatattttactctttataactctttccaatattctatttatgtttagggtggtctttagatgactgcacctagttctattcttctatttgtctttcttttcattcatataataattgagatagctcaacaataatgtagcaattactttacaatcacatagttttattttatccgtgaagagttcaagatgctata

SEQ ID NO: 1453 - DNA, 598 bp, Plutella xylostella
tccagccatttccacacgtgttatccgagttgatagaaggagaaataatgttgccatggtgatccatcggagggccagcttcggtgtcccagaagtcaaaactgctcatcagttgaggctctccgtaaggatgtgccaacatgaaagctatagctgctttgtactgctttgcttgcttgtaggtcaaaatgtttccaccagcaccatgacctctctggttgtcatggttgtcgatgaaggtcaaagcatcctcgtgaggcagcagaccccatgcgggtccccaagtggacaaccatttcaactgattgtttcccttaaaagcattgctcagttccagtccaaatttgaattctgtgacagccgctaaggatgtgtattcttctcttctcacagcttctcctccaaggtcgataacttcttggtagatgtaaggtctagcaccagacgggaaaccatgagcagtgttcaagttatgaagtctgctgtagatgacgctgaggtctcctggccacatgtgcttggcagcatctattctgaatccagctacacctaagtcgatgagcctgttcatgtagtcaactatttggtcacgaacgta

SEQ ID NO: 1454 - DNA, 597 bp, Plutella xylostella
cacccgcttgatctgctcccggtatgacccaatatcctcgaaactcttggcgctgttcaccgcaaacaccagcaggaacccctcgcccgtgcgcatgtactggtcgcgcatcgccgagtactcctcttgccccgccgtgtccaggatgtccagcagacacgtctccccgtcgatcaccacctgcttcctatacgagtcttctatcgtcgggtcgtattcgtccacgaagtggttttgtatcaactgtatagtgagggccgacttgcccacgcctccagcgcctaccaccaccagcttgtattcggtcatcctgcgctgtgcgaggcaaaatatttttcacaacacaaaagtcacgggccacaagaaacatgcacagcgtcgacgggatagccacacctaagatgttactcacaaaggcatgactgtcactgccgctgtattattgcactcggcacgcgtaatacggttaattaatttatttattgcagacaaaatgcaataaatgacaatgagatggttcagtcacccttgatttgattgaatatttttttatgcgtttcgtttaggttgcgtcacatacgtaacacttttcagtga

SEQ ID NO: 1455 - DNA, 597 bp, Plutella xylostella
cctcagcgtccatgcagtcctttgtgacttcagcgacttcattatcttccagtttctcacctaacgcaaggagcgtgtgtgtaagctcggcgccaagcataagaccgttctcgttcttgtcgtacagtttcagacattccaagaagtcttcgtactgaccctggtctttgtctttctttgcttggctgtagatgggaaggaactcttcaatggtgagcgtcttctcgcccttcttcttggtaccaccgagcttctcgatggtggccaatgtggggttggagttcagtgccctgaggacatctcctaggttgaaggcatcgatttttccgctaccatcgaagtcgtagatggagaaggcgaaggaagccctttcaacgtcgttcttgctgaggtcgctcattttgtgtggtgttagttggttccctcccggtcttcactggcagacgttcagacaagaagtggggttcgggaacttttcgcgggacggttttaactcgcttagatggcgcactcgtctggatatttgagatttagcccaggaatccgcgatcgttctattttgggcgaagccgattcgtctacctgaaccactctgtt

SEQ ID NO: 1456 - DNA, 597 bp, Plutella xylostella
attattcgatttacactgtcatttacaataaacttcaatgtagttggtaggacataaaccaatattgcataacactaaggctaaattgcatcagtattttgtggataaattaacaaaaatatatgcaatattacagattcaaataaaataacgctaatatcttactcgggcacctgtctcgcactgcggcggttgctgagcggaggagctcatctaatgcaagatggaatgtctcgataaatagcttgccccaagtgcataactagcctagcaactccactactgttcgtcctgtataatgtataactcgtaagagatgtagcgctacaccaaaatttccagaacttgcgaaataaaaaaaataaattaaaatatacaaaatctctatcacaatactcgtaagtaattaaagcaattcaaatgtgaatactccaaatgttgaaatacgaaggaagcggttacatcgacaatgtctttactctataagctcagccaggcccttcccaatcaaaccaaatcgaatagcaaattatttgttcaataaccgtactacacagtagtcacactttacacatgtataaacgttgcaataaatat

SEQ ID NO: 1457 - DNA, 597 bp, Plutella xylostella
ccgctgccaacttcagaactatgaagttgtttgaccgaactgtacaactttaattagagggcaaaatggcatgtattgcagatgatatgcgacatggattggcgcaaatgttagataagatagataagtttttggagatcaaaagatcgggagatctttagaactctgccctcggtaatagtttaatataacaattcatcaagcttaattttagattcaattacaaaaggccacacatccggcgtgaatgtacattttaaaaaagatacactattattgtaccgatttaatattctaactaaatcgaataacatcatttaccttgtcgcttactcttaaaacctaacaaagatagattttgtgctgcaaatggcatttactataaaattaataaaaatataaaaacaaaagcatacagtacccaatttcccccctaaatgtgaacgatatacataaaactagccacgttcacaaaaataactaatataattttatatcgaattacattaatatctttagcttgtcataaacaattacgagtataataatttccttacaaattatgtctttaattataagaataattacacttaaaaa

SEQ ID NO: 1458 - DNA, 597 bp, Plutella xylostella
agtggtcataatctctttattatgattgcttcatcaaagataactacaactaatgtataagcttcagatccaattaatgcatttatcgtcgttgtattattgatcaagatagtgatacaagaggcacacatgatcttcaattatcttatgtggtcttttttttaaagacgctctactgctactctaatacactcttgctttgaaacaccgtggaagactatttaacaccatcaacacctcttgtaacacctgggggggtcactctatatgatggaaaacgaagtttgtgttttatttatcgaggcgattgcacgacagctctcggtcgttagtttttcgtcaatatagagtaaccctcctgcatcctcatcatcagctactctcagtatttctccagcacagcctcgatcatggtgagctcgggggcgatgccctcggcctgggcgtccttcttgaagcaggcggcggtcttcaccacgcggctgcactcgtcttcgatgtcgtcgtacttcttctcgcagttgtggatcagcctcaccattgtctctgagagtaggtcacccttggggaagctcttgatgtagtcgtgcatgttct

SEQ ID NO: 1459 - DNA, 597 bp, Plutella xylostella
tcacccagcgcccgtaccgtaaagggtccttaatatgtatgtaccggtcgagcgagatcgcgcacaggttgagaatggacgccgtggagcacatgacgtcgcacgctacccacgtgtcgcagaactgctcgccgaacacccagtagccaagcagatcattgaccccagcgaaggtcatgacagcggccgccaccagcatgtcagcaatcgccagcgacgccaggaacaggttgccgatgcgtctcagccctcggtcggtgtagatggcgacacagaccaggatgttgccggccacgctcaggaatatgaggagggagaggaatatgccaacgagtaatatggacagtagcgtgactgcgtcggggtcgtcatcgtcgtcgtattcctccaagatggcgctgctgtcgttcgctcccagcaccacataggtaggtagggcagacacgtactccatcttatgcgctgcgcatggcgctcaggtctcgtcgctcagcggccggcgcccgcgcagctcacgcggccacgagtcagccatcttggatccgcatcacaggtctgcattccatgaaaactttttgccgccacaatccaaacttc

SEQ ID NO: 1460 - DNA, 597 bp, Plutella xylostella
atcgaaaacaaccgatctgtcaaagatttctatgcgcattatcaattttggagcactgtatgtcggtggtggtacgggagctgttcgtgatatccactctggaattttctaataatgataagtaatccttattactacagaatagcagatatgataacaaaaccatggcagagttattttaccaaccctaacctcaaactttatttcaacacaaataaatacctacgcaacattaatatacaccagaaattgatttaccagtcgtactattgtacctaaaaacaagtaattaaagtacagtctcattcgtacaagttctaggtccatttactagagaatatctactagacccgccattttttcttccagtgacagctccccttataaacaactctttaaaggtctctctaaactgcctagacataccgcagtaaatagcaaaattaatcggatacgaaactatgatacagaaattcgttataagtataagaatattcgcgatatgatagtctaatatttcaacaattgtgctactgatgatatgtagtattgtgacaacagctaccggaatttcgaccaataggaacacagttacaa

SEQ ID NO: 1461 - DNA, 597 bp, Plutella xylostella
tacaaggcgtgagtgcgtgttttttataaatatgtatattataaaaaaaaaactattaaaatcttgtactataatgataatactaaggaaatcatggaattgtttctctttaagattacacataaacatctaagatgcttacatttattgaaaatgatatcttttaggtgaaaactcagggcccatttcataacttacaatgctataaaataaagtatcatttcgaaaacctgttgcaactactctcaatcttttgctgggtaataattataaacttagcaactggaaatgatcaaaatgacagaaagaaatctaaatctattagcaatagcaatgatattggaccaaagtacttgttaaggcaagaatcgttgatagtggaaccatgcatagattagagagccaagttaacaaatgtgctgataaaaaggttaatgtggcctagacttcaatgaagaaaatgaaaagttttatgccactcagtaaaaatgtagtatcatttttagcaaggaacattactactcccactctaaccccaacactacaccagtgtgaagacgagatgagtgcagagatgttattaaggaaccaatagaa

SEQ ID NO: 1462 - DNA, 596 bp, Plutella xylostella
ggctataaaactatacagtttcacatattcgatcagcacactccgttactcgggaataccttaacttctatcaagacctaagcgtatttttgcatcttcacacggaaaatgcgagaacacgccagcgtcttgggtaactaagagttactatatcatatagaagttactacataaatctaattatacatttctaaaccttaatgatgtttagttctgattgtgagggttttgccgtcgagggagatggggccagcgttccaatgacgcagcagatttccgtgctttccatatgtagacccttggatgttgacatacggagacggggacggcagccataaaggctcaatagcgtgggtaagaatcggtgccggcgcaatgattggctcagcgacaatcggcgctgggtagtgaataggagcgatatgttcgacgataggagcgtggataggtgcgatatgctcgacgatcggagcttggactattggcgccacatgttcgacgacggctggcccaactgagtgaatgttggctccaatgcgtttgacaactgcgttgaaccctctgagcgggtcggcagtgtattctacaaggcggat

SEQ ID NO: 1463 - DNA, 596 bp, Plutella xylostella
tttactcttagggtgaatttttcacaccaaaaaattcacaccgagcaagaaagatgttacacagggtaaatgatcttgatgagcctgctcatagtaacaattgttacattaaatatcgatatacatgtggatttactacaactgcatagcactttttaaaagtgaactaaaattaaattcctactaggtcaccatgcacacttcatagcacttacacatactgcatagttacataacagctctctcaatcacatgatttggattccacagcttttacatgattttcagtgtcctgtttagatcacttgataataaagtacaaggtctcactcccaatgccacaaaggttaagtattgattaaataaccacataacaacaaggtgaaaatctacaattttcacaattaatgatcactaatgaagttctctattccaacattatcaataattttagttttagacattaattagaggtacagacaaccttggcctcaaaacattgaacgaaatgaggttgttacataacacacacactggctggatgagtgatggtcacaagcaaatatatttagaaaaagatctaaatgacataaaat

SEQ ID NO: 1464 - DNA, 596 bp, Plutella xylostella
aatgcccacttgctagcttgagcttgacgcaattcatctgcataatcagttggtgaaaatcctcccctcaaggatgaaaagttggagcagtgcatgtttgatatcccgagcagttctgacagatattggatgcagttggggttattgaagcccgggctcttctccagaattgcttcgtaactttcacctttcatgtccactgtttttttgtatatgagcgggaagtcgtcagtgctcaggaggcccaagggaggcttagggggcgggtcatccgggccccgggtcactcccttcatgcccaccaccattttgtcagtgtcggggataacttctaaaacttcgcagcagacagtgtcattcatcaggtagtatcttgacacatttttcttatccacagcttgtatgatattagttactggtaggaatgccttcacattgatatcagctacatatcttgaagtgggtcccgcagtgcacagaacttttagcatcatcccagaagtagtcctgttgatcactgctccaataattagctcaccagtcttcacattatcaaagaaatgcctcagcctcgctgatttatcaacattcaggaa

SEQ ID NO: 1465 - DNA, 596 bp, Plutella xylostella
cttggctttattcgcgcctttcttagccactagcgacttgtccaaggctgtctggcctttcgtactgaacaatctctgagcgcgttcctccaaagtgcctccacacttgagtcccagcgccatgagcgctgacttcagtctgtccagaccgagggacgccaactcttcccaagaggagaatgctgagaggtccaagtgagctcccacgttggtcaaggcgccgcctgtttctttcggccacccagggaaggtccctgcgtcccactgcctcacaaagtcctggtgagctatccccagctcctgcgcctggtccagaagcggcttgacccgactcacgaagtccttcagatatgccagcagagccctgatgtagttgcggtattcactgttcttgcgctcccgtgggatgtcgaacagatggtcgaacaggcccaggtatgttatgtagtccactttctctatgcccttcaggttgatgaacttttcgtagcactcatgaaggtccaagtattttccatatccttcttcatccgtgaactccactggagtggtataatcttcagctgggttctctcttatattggccaactcttcaa

SEQ ID NO: 1466 - DNA, 596 bp, Plutella xylostella
gtttctttgacatgttgactttgtttttttgctaggcaatggaaattatgaatttaggaaaacatgaaaaatctgcttttaatttaatacaactactttatttacactattataattacaaatctagataggtttatgtggtagaagttgcttatttctggaaaggataataatccaaacctgaattgtaattaaacttgtatgtgaatttgttgacctgagttttgccctcttctatcatgttctgtacttccttgcggtaggcgggcggcagcaactctttctccagggtacagttggtattagtttcttctgtcgctttgtacactctttgtcttatgatatccacatctctaccatattcttctttaaggtcagctactactcttgttggagtatcgattttaaacacgaaatagttcgcttcccgatgcacaactccatgggcactggttttgtaaggcatcgcccgaaaacccaaattttcaatgtttctgattattccaccacggctaaaaatgtggtgtgaaactcttttgagcgtcgttttcaactctgcctttggcatagtacgcaacattaatgctaattcgtaa

SEQ ID NO: 1467 - DNA, 596 bp, Plutella xylostella
cacgcagtagtggggctcgttcacaggtccaaaaacatcaaacacttttcccaaagctttagcaccattatctaagaataaaacactgtctaaatctacggcaggagtgtccggcagcgcgcggactatcactaatctatcaacaatactagctatggtgccaatcttggtggtctcctgtgcgggcaggctgatggcgaggtcctcgatcggcggcaggtcgtccagacccagctccccgtgcaccttcaggggttccgccttctccggcttggcttcattttcatcaccactggacaattcctcgatgtctttgacactgtctacatcactgtcactggaatcagagtctgaatcactagagtccacatctctgtactcggtcacctcgtactccaccactccgctctccgcactatctatgatcatgtggcgcgtggtctcctcatcttctcgactgctggaggccgacagcgggccgtgggcacaagcatttataatgttattcttcaacaccatctcgctcatctccgccgcctcctccgcctcgtcgttccccatgttctcgatcgatggcgtctccgtgtcatcggaat

SEQ ID NO: 1468 - DNA, 595 bp, Plutella xylostella
ttgtgtcagtctccttagtcacagatttttcagcaacaactgcagtcttcttgtttaactccgaaataggcagtctttcggcttggactttcggcacgagtattttgggtggcagtaccagtttgctttccctaatgagattaccagatgttcttttcttcttcttttcgttggcatcgtcgctttcactattcagattccgcttagcttgccttaaattgtgtccgccggtagtttctagaatcttatcggagataaccgccgcaatcgactctcctcttttaggtctatttagaattgagtcaggtgtttcggatatcaaggatagaggtagatcagcctcgggatctgaagggctcgagggttttgagttcttgctatcggaacatctcgccttagacttagatctgctgtcgtgcatgatattgctaacgcaaatggacgacttaggtatttgatcctcaaggtctattgaaggttcgaatattccggtcggtttatctacattgatcacgagtttttgctccacgtacggttcagaagctttggacttcttagtttccaacagcttgcctttagacacgggggatttaat

SEQ ID NO: 1469 - DNA, 594 bp, Plutella xylostella
ccttgccctccttgcgctcgatggtccaccccttgaaccacggcatcttgtcggacggctccagcatgttgtccccgtgccagcccgagatcggcacgaacgccaccgacgccgggttgtacccaatcttcttgatgtacgacgacacctccttcttgatctcctcgtagcgcgcctcgtggtagggcggctcggtggagtccatcttgttgacgcccacgatcagctgcttgacgcccagcgtgaaggcgagcagggcgtgctcgcgcgtctgcccgttcttgctgatgcccgcctcgaactcgcccgtgcccgccgccacgatcagcaccgcgcagtccgcctgagaggttccggtgatcatgttcttgatgaagtccctgtgtccgggggcgtcgatgatggtcacatagtatttggccgtctcgaacttccacagagcgatgtcaatggtgataccgcgctcacgctccgctttcaacttgtccaacacccaggcatacttgaaggatcccttgcccatttcctgggcctccttctcaaacttctcgatggtacgtttgtcgatgccaccgcatttgtagatgaggtgcc

SEQ ID NO: 1470 - DNA, 594 bp, Plutella xylostella
atcgactttcctaggggcgtataagttttaaaagctttacattcaaaagtcttcacaaaattgtataacttaccataatctatgttttttttccaattaaaaagataatatgtttattttatttatctcttaacactacaaaataattcttcactaataatgcagattttcttgcagtaacaaaaattaaacgtctttaatataataactaagcattttcgtatagatttgtggagaacagttgaatatataggtacctatgtaattgttgtaattgttatttaacatactaaataggttggctaaattacaagaataggggtagttcaattcccagtatcgcaaatatttaaatttattatcctggattattataaaattatatcatcatataatgtactgtataaacaacaaatatcattattaaactttaaaaataatttataaaaatttgctacagtaaagtaaatattaacttataacaaaatcaacaatttaactaacaacgtaacattttgtaaatattttgttttatacatatctatagtgacgtcttatgctcaatatccgtatcagtattagttgctagcacaa

SEQ ID NO: 1471 - DNA, 594 bp, Plutella xylostella
gtgtcagggcctcggttgccaactactctgaagtctttgtagtttcctttggtcttggtttcgtttctcaagacgctggtggagacggcgaactccgtgtggctggtgagcggactgaagtagagagtgcggaagccgtcgctgcctgctggagacgcggagattccgaatatgccctccactccccagtcgaatgtcagaccggcgatgttgaattcaccaacaagaggatcaggcatgaagaagttgtgagtgaaccgccaagatttgttctgctcccaggagtaggcgatgagtccatatccaagttcgtcggaaaagtatgcgaaagtgtcttcgcaacttttgccttcatcgagagcaatgttagcgatgaaagtggtggggacgatgtcttcagggcggaagacgtatctccggagacgacggtcagttttaagatcatagacgttaagggcgtaaggacaggggttagtaacattgggatcataaccataagtgccaacatccaacacccagagacggtcacatttgtcggctttgattctgtagacggtgttgagtccattctgacagttgccgagttcattgccc

SEQ ID NO: 1472 - DNA, 593 bp, Plutella xylostella
cacgggcaggaagagggggttcactggaccatacaaatattcaggtaaattccagtcttcgtacattctagcagccaatgggaacactttttcactaattatttctaaagcagtcaacacaattttctgtatactggaaaaatatctttcaaacacccatcggagctgccagaacaattctgttctcctctctttgctcactgaatgcactatattaagtaaatttctaatgttttcttcaggcacaaacaacgcaagtctctgccagtctaaatgcgaactgaatggcatgactacagagtctgctatgactatggggatacactgggatgctaacacatccatcaatgctggctgcacaagtcttgcactccgcacaacaacacaaaacacaccgtcttttaacacttcagggtaactgaacacttttcccgttgcatattcacatcttttcgttgcatctccaacatgtccagcacattcttctagtagtaataagtcatttgatgcggacgctataccttttaattcagcaaggtaatctgaagggatattaagttgtgtggatactatgagatatttcttctgttttg

SEQ ID NO: 1473 - DNA, 593 bp, Plutella xylostella
cccaaccttgccagtcttgcgtcttctgtgggctacgttgaaacctggaatttatattaacacccattatttatacaaagtaaaaatcttaacattgacgcgcgcaatgcgttatggctctcatacataaactcgatgcaacgtggcgtggtattgtaaaaacgtctccgtctaacttgcaggtgttccaatgggggagagtgatagagtggcatgacgcgacgtcgtatcgtgtgtatgtatcatttaaacacagttatagtttcctaactattttaccattaaatgagatgtaatttaataacttgtacctaaatctgtatgagaatatgccaaagataaagtaaattctctctagaattagtttaatgttgcacataatttacagagtgtggttactgaaaatctacacccttgaacaaatgtgcagaaacattattcaggcattatgaatccaacattgtggtattctgacatacaggtatttaaaatacttaaaaagtttttgtgtaacttgggtcttgatgagattgatactgataacaaaatctataatttaatctgtactgtaactgtatccactaaaaaaatac

SEQ ID NO: 1474 - DNA, 592 bp, Plutella xylostella
tcggctctccccagtgcaggtaattgatggagtagctccagtggtcctcgttgtgccagcagaatgtggcgaaacacatgcccacgtagagccacgggatcttcatgccggagatgtctgcgttgatgtggcccagcacggagccctccagcacgggcaggttgttgaggttccagctggactctgcgtactgctgctccccggggtataagtgggcgctggacttggttggaaacccagagccatgatccatagagtgcaagtcggccccgtattccacggtgacgtcctcgtcgatagaagagacaacgcgccagaactccttctccaccgtcgatgttggcaccatatggacaggcatattgaagtagtccgacttgaactgatcagccatttcgccgaactgttgtagcgtgtattcgcgcgaggcttgctcgaagccaaacgcctccgtcggttttgatacctcagtcgcgatgcacacggggcatctccagtcgcctttaggcacgatgtgaagaggcggcagcagacagaacgtgtggtaggagtcgtcgcagccgtcgcagagtagcatttgctcctcgatgtc

SEQ ID NO: 1475 - DNA, 590 bp, Plutella xylostella
tttctcttcataaaaatttcacagtcgtaatgtcgtaaaacatagcacctaggaacttataattataaattgtacagcttttaatctcctaaattgcattcttcgataagttacttataattatagtttttatgatttaatattgaaaggggaacaagctctcccataaccggaacctttcttcaaacagtctctctcggacggtgatttgattccctagccgcaggtacttccggccggcgggtgtcatggcgggccacgagatgttggctatttccggtatgtcgccgcgggggttcggatcaccgtatctagcgaaggtgctccaaagtcctgtcatgatgtccacgaagggcccgtgcttgctctccgcactgatgaagggaaacgcgtagctcagactgaacaagtagatcaggtcatcgtggtgcatcgctcctataggtctgttagtctgcggatccacgtagtggctgctgtcgcctacatacgcgaactcggagtagaacaccttgtggggggagtacttcgacatcaggttggcgagacgatgcacctcaaacccaataaccgcatctccatacagagtg

SEQ ID NO: 1476 - DNA, 589 bp, Plutella xylostella
ttgtcaagtgtacattacctattacacataataaaaaaagaaaataaataggcacatcacattcataacgaatgtcttaaaaaacttaactatctatgtcggtacattaacttaaacaaaatggtttactaaattaatttgttaacaatccacaatttgattgcagctcgttagaaataacttgtatggcttcaactgttttgtactcaaataaaaataattgtttaaaacttcaagctcgctgttttcaaggtgaagtgtgaaatatactcatcactcattggtgctcaaaaactaaatgcgaaaccaattcgttagttttgtgaaagttcgatttttcagtagtatttgaaatggatactcaaataaaataatacatccaaatgtacttacttaataaaaaaaaaacattaagtagcaaaactattcatacaaaatgctttccttaaaatattaataatattttgtaaacggaggggataaaatgttaaatatacttaataatttacaactaaaaacgcgatgctctgttaataatattgtcataccttatacaaatagaaagcattaactatattcagtaatttaa

SEQ ID NO: 1477 - DNA, 589 bp, Plutella xylostella
cacccaacctgagctcttcggacgcagcagtaaaggcagtatcgtccacgtttctgcattctccaaaggcttgtatactgtgttgtacactcggtctctgatgttcaatatgcgcctgatctgctccccgccgtccgagttcactgaactaggcgcgaagtggaactgtatgtcgggccagttgccggacggcggcgcgtacttcgtgtttacgaatgctagtccttccacgccctgcgtcgtcatcggccctttctcgtacagtatgtagttcgttgccacagctaacgtttggaaacggtccttcttgaacgtgaccggtttgttgacgacgaatgttaaacctccgagccctacgtggtcttgcaagttgtgtccgactttcaagttggctataactgggatcccgtgctctcttaaatgctcagcgggcccgactccgcttagcatcagtaactgtggggagtgcagcgctcctgctgacatgatcacttctcgttttattctcactttgaacctttgcccatttttcatgaactctaccccgtaagcttgcttcttcacagagttgattaatattttggtgacc

SEQ ID NO: 1478 - DNA, 588 bp, Plutella xylostella
cccctatcttacaagttatggcgtgtaccacatgaaaccactcagcagatcatcagacatggcgcgtatttctaaagatatgacacagcgccatacctgtaggaaccatgaatgcggtctgtcatcggggtgataagattcgcatggtaaccatggaggcgatcctttgggggcatcgtgcaggggttgttccccaataacctcgggatcttctcagcgtgtatcctgaagttgaccctgttagagttgagagtccctgtcatgactctctggaagctgctggttaggacccaaagttcttgttcgcctttgaggttgttgactactttgactccgctggcgaactggagggtctcctggttgacggcgatggtgtggaagttccgtggagcgaactcagtggcggagttccagcagagaatgctgggggggtccatcaccccgaagtagaggatgccgttgcgatccattgcttctgcagctgattgtgttagccgctcttccggaaatacattcatagcctgcggatcagcattaggattagtaaggaaggaagagttcctcaggatgctggtcctcacgacattc

SEQ ID NO: 1479 - DNA, 586 bp, Plutella xylostella
ttgcccataggcaaaaatgcagacattataaccatccaatgccgactgtatcatgggagacacttcagcaaacacatcctcctgacgtgagtgacgggtgaaaataccatcaaaagtgaatgattgctgcgctttccctttccttgtggagtgtgatgctgaattcagttcaatcttttcaacttcaatagaacattcatccagcacatttaagttgaacagattctttgtagcttctgactccaatggcggtcttattctacagtaaactctgatgttgccttttaggtcttgaacagtattgcgcagttctctttgttctttgtacatgttagcaagaatgttttgtagactttcagcatcagttttgtacttagagatcaactcttgagcatctttatagtccagcttcagtttgtcatgttcaattgatattcttttcaggtgttcagtcaatactctaagagcctctgcttcttcttttagtccagtatggcgccgtgtaaggtcatcaaattccatttgtaatttgtcaaactcagcagattttttcttcaaattgtcagctacttcttgtaatatttta

SEQ ID NO: 1480 - DNA, 585 bp, Plutella xylostella
gtggcttgatggcgagttctttagatacaacgttgagactgggctttctcgagagaagccatacgtatatgtagtgtttatcaatgagtgggctgtagctgcaggtgtagactgttgcgtagtagttgtagttagtcgccaacacacggaacggatactgtcttctcatcaatcgtctcggagcatccttgaaggtgaaagtgacgtctaatttagcagcattatccaagctggtgggtatttcaagtgcaccgatgctgtaccggtggaagagaccacggtctaccctcgatatgttcaggtatatgccagagctctgagtctgaagttctagcgtagagcagttactgagatgctgatgatcgctggcgtaatggaaagcttgatgccaagtcccaaagaattctgctagtctgaagtcttgttgaagagtcactccctcaggacactttccaggcgtagtaaaataacaatgacacgatgttgcaagaattataaacaaaaataactgaaacattattaatagttttgatacaataacacaaaattaagtctcgtctgaactgtatcagtatatacagtgat

SEQ ID NO: 1481 - DNA, 584 bp, Plutella xylostella
aagaacccccacacgtggtcaatgacacccggggacattggctcaaacttgtccgagatcacatccatgtcaagcaggtcagcggccagggcgtccacaacctcgatgctgtacttcccattactgagtacaaacggagccgcattgcacacttcgtgaatagtccgcgtctgatctgaccagaacccagcgagggtgcgggcaatcacatgctccttgatggtgagccgctgcaccacgcctgtcaccgactggttgtagttgctggtgatcggcgcgccgagcggcttcaccaggccgcgtatcacaacatatgggatggtgtagttggaatacttgtttatttctttgtttagtgactcgtctatgtccagtactggtgctgtctgtagagcatttagaatatatttacatttgctcagctgtttaacacaaaaccccaaaataagggaatcaattcccagtatcacagtctctccaactatttccgaaaagaaatccatgatatcgatttcagattcagattatacaatggtttattaaacgaatgatctcattttatcgacaaaaagaataataacgat

SEQ ID NO: 1482 - DNA, 584 bp, Plutella xylostella
gtacaacttctttattagataaataaaatctcccgtctcctccagaatacatagcatgaatgaacacagtatacgaatactaatagtaaacattcatagtttatgttttcggccaatctattgatgacatacctaattgaccgaaatacatagtttttaggtctaaattgaaaataataacattaacttaaagtcttaaatgatataatagtccactaaaaagtattgttattgaaatattaacaaaattcggacctttgtgtcgttaatattatgtgtttgacttaaattcttatggttttaagtccattttcctcttaaatctagtaaaaacttgaaaatgtatgcaatttaattcttctaaccgtcatccacagcgtaacaatcgatgttgaaccaccataacagcctgtgacactatcatttcgacaatatctcatacgatctccaaatatctccacatatcgtcgctgtactgctaacagcaattatcattttacagatttcacagatgaaagggcgtgaaacgcaagaagtatctttctgacaagtctctttaagtaaaatttaccttttaagtaaaa

SEQ ID NO: 1483 - DNA, 576 bp, Plutella xylostella
ttgtcagtgattagcggaaggtacgtctgtggcttttgaccttgagatggcacgattacgtactgaggtacatcgaattgctttggtgagcctggtgccagaccaaactgcgagttcggtgacccgagttgggggaagcgggggagggcaggcagggcgggagcttgcggggcctggtagggcttcagcgcctgtgatggctcgcacactgttccttgcagtagcacactcagaggtgcggtgtatattctgaagttgatgtcactgtagtcgaggtttgcttccaagaacaccggcattctgtccgacagaacccacacgttctcatcatcatcaattttgacatcactggggaagaccaagccaacgtcatccttgtcaactacagcagtgttttccggtttcaggggtttgtttatattccagcagccaattccgttctggtcgattaagctgtatagttggactccgttctctccgacgaccttggcagtggtgtgagtgtcagggccgcggttgccaactactctgaagtctttgtagtttcctttggtcttggtttcgtttctcaagacg

SEQ ID NO: 1484 - DNA, 574 bp, Plutella xylostella
ccagttcaagcgccgcgcggatcaacttgttcaggtacttcatgcggggactcttcaacttgtccgacggcttcatgttcaactcccgacgctcgcccttccccgctatggcctcgaatatgtagtgatagtcgatgtcgtacaggttattcagaggcttggtgaccttcagcttgaagtggcacatgtagtagatagtgcaggccacctggtagttgaggctcacgatgtcagcgtcggcgcggtgcgtgttctgggccacttcgaccagcgacgggttgttgtcctcccagatcttttcatactgcacccggcgtttctccttgtccagtgtcacggacgaccatttcagaaaatgctccagatatgtcgtcgccacttcgaggaacttcaccatgttgtcgtctgatagagccacgtcctgcacgcacagtctctctttaggcagcttccccactttattgactaaccggcaactgctttcaaacacatccttgacgtaggtggtccatatgatggagcagagtcctagttgtagatgttggtcggagatgtgtgtgaggcagtcgaggac

SEQ ID NO: 1485 - DNA, 573 bp, Plutella xylostella
aggctctcagtcggcgctctatagtgaaagatgtctatcaaatctagtatattgtaattatgaataatatgtaattttaactgacaatgtattttacttaagtgttttatttaaataaataactatagaacgagctgcgattttatgtgtggtgtaggaactagatcatgtctgtagataacaaattaaattttaaatatagctttttgcaaatatgtttaaatttaatatgtcttttatgttcggccctgagttatgaacccatatttaatagagaaacacatatcgaaaatttatttatctttattgaatcacaaaaaagactattcaaaagttacaagctgtcatggcatacatggctagtttttggtatggtacacaaagtggggattataaatatctaaactaaaagattgccgacaaagctggaggaacttcatttactgtctaattttacaaattcacatctcaaaatacaaaaatatacacatataaggccattgatgtaatcatatcagttcctaccattttatcactacctattttagaatacactttttttttcgtaaaaac

SEQ ID NO: 1486 - DNA, 568 bp, Plutella xylostella
ccacgttaaggtctaaacttccttttgaaatgtttttttgccaaaactgccacgccgtattcaagctaattccaatttttagaaccgtatctcccaatacccagaacctagaatatggaaactaatccgccagaaactgcattttttaacttactctagctattgggtattggaacacggtcgtaacgccactatacaattgaacaacatctaagtgtgcacttcaggggtgataaccagagtggtcctaactcggccccgcagtatctctaacttcaaactacccgcagttttctctagtactgcatatatatcggtggcggagcgcgccggctgaccgttgatggtgatcacgatgtcacccggctgaagaccgccattgtaagccggcgagccaacgatgactttccacaccaggatgccgtgttgaatgtctgtgggcaactctgggttcctcatccgcagctccatgaggatggtgggcgtcagcgacagcatggtgatgccgaggtagcgcttcgacacttctggtggcttcgtcttacctgggaaacgtatgaataaggct

SEQ ID NO: 1487 - DNA, 566 bp, Plutella xylostella
cttaaatttcacataattattatcatcagggcacttgttacttaatatacttataaaattacaggtattacctaacttaacctagttggtgtaacaaaaatatattaggagtaaaaaaatcatgatccacaactaagacactcgtctttgttttgcagagaacatgtgatagcagccatgttagcatcgtatttatcagattttccatttgctatgcttgacttcgccttcgccttgtcaacagtgaattgtattgcatttacagcaggcttagtacgtaaataatacatgccagtcttcaagcccattttccatgcatagaaatgaattgatgtcaattttccatagtttggttctgctacatggatgttaaatgattgactctggtcaatgaaagcaccacgatccgcggccatttggattgtggtcttcacagatatctcccacacagtcttgtaaagatctcttatttctttgggaatactttcaatagattgaatggatccattgttgtgtataatgagatttttcatatcatcatcccataaatcagcctcggtgagatc

SEQ ID NO: 1488 - DNA, 566 bp, Plutella xylostella
tggatattttatagtacaaacttagtgtcactgtcagtattatattatgctaaaaatcataagaatcacttgaattttatttaaaaatcattcaggcttattaatgaagagagcaaaaatatacaacatactaaatctaaaattttaaacaccacggacactaaaatatggccacttgagacagtaaatccataaaaatgttagaacatacattaaaatttattatgtcactagagagatttgttctcgttattaacttagcagtgtccttacattacacaaatatttacttttaatgagaaaaaatatctgtcaaacattcttactaggtttatcaaactgatattttacagtcttttttacagatcattaaagttcttgagtatttccataataaattaaagcttcttattaaaaatatttacggtatcgcttaaataaattacgtaaatgcaattaagtcgtaacttattttgtcatatagtcagcatatagaagtagggtccccttccatagtgcacgctacattatctagtttatgggctaagtgcattttgttacatagt

SEQ ID NO: 1489 - DNA, 565 bp, Plutella xylostella
tatatgcaggtaagcagcttaaaatacaatatggcctaaagtacataacctatgttttacgcaaatcgtttatttattaagaaaaataatctcaatgtaaactataaaaatgtatgagatacgacaatacctgttaatagttctagattttaacaacacatattcttattttccttgtttttgaaacaggaagaatatatttagtactcttaaattgttcaataatcatattattgaatgcctgatatcaaaccatgtgataggccgagattgtagcgaaacaaactgcaaaagcgtaataaaaaccgataaaaactttcctacgtgatttggtacataaaaaaaatgctaaaaatggcagtttcttacaaaggcaatgattcataaatttttaaaaatcctcaaaagtctcgtatttttatacccctccgaatatgagaaagaattacttaacaaaaagtaaatagataaaaatataacttataaaagcttacaaaactgcactggaaatgttgataacatagcatttacacttaaaaacatacataactgcaataaaaataat

SEQ ID NO: 1490 - DNA, 548 bp, Plutella xylostella
ccgtcgcggagggctgttgctgtctcatgcagcttgctagtatcagcagtaatcggcacaactatatcatcatggtaggtccgcagcatggcggccgcgtcgcgcagttctatggtgagctgagtgaacgcaggtctagacatcagctcgccggcagccgcctcgagttgggcggagagagagtccagggacagggaggtgatgttcgtttccagcgcctcaagaatcctgtcaaagttgaactcgctcaacccggtagccgccagttgtttcagcttctccttggctgaaggcttcagtatgacgacgttgcgcgcctgcgtcgggtacgcgggctgtagggccgccacctgccgcgtgatttgtagttctaggtccgacttgatggcttccaggtcgatgattcggtggaagtggagcgtcgtgtaaatagtctggttgtcctggcagcggtataacacagctgacaggttgaagtcggggtcgcggtgttctttgaacagcgcctgctccaggtccaagaatctatccacgtcttcgaacagacg

SEQ ID NO: 1491 - DNA, 545 bp, Plutella xylostella
atcaagtaggtatagatagaggtagagacaaataaaaaaggaggatgaaattcgaaaatttaataaaactaaaattcagttccactttagtgtagacttacttaggacatactatctaccgataaggacgaccagacacaaaccacatccaatagtttatttataatttaaattatatagcttttctaaaatatttcatcacaatagaatgtgtaaaatacatgaacaccacataaacgataacacaaaatgatattatactgtgccaggtttaggttataaatatttttcaatgttaataaatatacttttcagcatctcaaaaggctaaaatacattttataacgtgaaattttcatcaaaaaggatatctacggtgtggcgcaaaaacagattaaaaagagattacaaaatggcgcctttgagggtgcaagacagaatcacaactaacaaagtcgcctgattggatcccattttaatgtgcgcaagatataatttatgactactatggtaacaaacacgacacgaaatacaatttgtacata

SEQ ID NO: 1492 - DNA, 544 bp, Plutella xylostella
attagtagctttccatcatgattaggatcactgtgttacttcatttcaggattcataaaatatagacttttcctcagtgtagattgaaatatagggatttgagcatgtttaaaatttgcacagaacaaggatacattgtttgttaccttagtgcacatgtcagcaaagtgttgcttattagcagtcttatgaataatgtcacaaagtaaatgtatgaagactgacccatgagagcctagtctataagcttcatactctggggcagtggcccataaaatgaggaaatctgatttaggcaggtaataatgattacttcttgaactttgtggaccatctgctatcagtttcagggggtctttatccttccttgactggcatgcttgtattatgagtacttttggtttgttacgaagcttcactgcatcctcagagtcaagcaactgttcaatatcttttacattcaaaggcacagaatctgccccataaatgtgaccctcaattccatgagacaagatgcacaaaatgaaaatgctatcttcatctt

SEQ ID NO: 1493 - DNA, 543 bp, Plutella xylostella
ctactgcggccgccatgtggaatgtgggcagtctggcatgaactagtgtttcccgggcgactctagccaatacgtcagcagtctccacaaacagcaatgcctgtttgtccaagaagttcatgatgtgtgcggaccgatccactttggtggcactgctggcccatttcaccagtgcaaggagacgcacaaacagctgtctggtgcgagcactgaacttatagatctcaatcttccgctccatatcggtctttcgtggcaacaactcagccagcacagtgagttcatcgtaggttctttggacaatgaagtcgatcagaaaagccagggatatggagccgccacggggaccgccaccttccgacccctgggcacagccctcgatagccacaggaaccatactgattgattagaactgtatggatatcaaaccaaataaagctttaaatcattttaaggcaaaatcgttacactaaatcaccaaacaatcagtatttatcaaaatacaagtatccaacaaacaaaaatccgagtgatcgacacaaa

SEQ ID NO: 1494 - DNA, 542 bp, Plutella xylostella
gtccatgtttttacaaactctagtacaaatagaatgtgagtagtttcaatacgaggtttccataaatatacattcttataaaatttattagatcttcattatcacataatactatagttctgatatctaatttaattatcgtatcgttgaaattgtattaaaatcactaagtaggtggtcacagctccgataacagaagcgaccaacggccggtccagtatgcacatcccgagcggcgagtactgaaccgagcgcagcatcagctgtcgggagaacagctcgagccgcgacggcagcacgccggtggagggcgcgtgcgtcatgagccggcacaccagctcctcggtccttttaccctcagttatggtgtagtggcacggctccaccaccacgaacatccgcagcatgtgcatcgcgcaccacaggaactgcagcaccaggaagtgcacgcgattggtcgatacgataatctccataatcaggaagtatggggtcactatcagatgcagcagcgtggagatgagtatgacgacgagcggcag

SEQ ID NO: 1495 - DNA, 540 bp, Plutella xylostella
ccagtagtatgtatcggttgagtgtgaggtagccaacatcaaatagtaataacatagttccaagtgaagaggcttctagagatttagtcatttcccacaaagtcaggaatgtcagaggcacagtcattgcacccagtgcagtacaaaaaattctcatgccttcatatcgggcgccatcatacttgtcccccggtgtctcaaagggaaatttcccatcatatcctgtcagtgaccctgacagagcaatgagcatctttccaagagggggatgaacatcaaagaatagagttctattgatgtaccaactggccatcttgccaaaatgtgtctcatcccaacatacatggtctggtactaggactttgtaaaatctggtggtgaatgtagcagtacaaattactgcaaaagttatccaccatattttatttgatgattgttttgtagaatgatgttcgctttttgcacccatattgtatccctcatgaatattcaatataaatcttcagcacattctaattaagaaatctaacagacagaaaa

SEQ ID NO: 1496 - DNA, 530 bp, Plutella xylostella
tatacacgggatcagctgcttgaactccttgcggaagttctcgttcatccaggcgtagatgaacgggttgtagcaagtggacgacatcgccaccacgtgcgagcagaagaagatcaggaagtagtactcgaggtggatcgcgtagatgtagtagtcattgcacaggttgatcaggttgagcggcagccaggagaagccgaatatggtgaccatggcgatcagcatctggttggtgcgtcgcttcctgttcttgtccagctcttccttcctggagttcttgttgctggcggccttggccttcgctcggtcgttcagcttgaagctcacgcacgtgtagcacacggctatgacgatgaaaggcaagacgaactgtagtatcgatgtcgccgagccaaatagtcgtctcagtttttccgaaggccacgtctcctcgcagtactttccgtacggcagatcgtaatacgtcatgaatatcgcgtacggcgtggtcaccgttatggcgaatgtccatatcatgattatgaccgaga

SEQ ID NO: 1497 - DNA, 528 bp, Plutella xylostella
gtcgcccagaggtacaggttgagcgtgcgttccgtacattgtgctatgaatctaacaaacggccgcacatccccctcattagccgtctgcagatgctggtagtacaggtggcggtgctgcttgggcacgatgaccggggggtagccggcctgcatcagcaccaggttcatgagcagccgcgacgtgcgcccgttgccgtccacgaacgggtggatgtgaaccagcttgtagtgcgctagcgctgcgtatctcacagggtgtagatccatggcatcctcagaattgagccattcaagaaactggatcattaaagagggtatctctgagggtcccgggggtatgtggccacccacatacacctgtgtcctcctgaaattacctccttccactggatctacatggccaagcacccttttatgtatctctaatatatctaccatagatatttccctcattctatacaataatgtggagttaatgtatttcatagcagcatctaaacctaaaatctcattgtgctcatctata

SEQ ID NO: 1498 - DNA, 522 bp, Plutella xylostella
gccctgcgtgtccgacgtccacagagtgaggttgtcgcgcagcagctgcatgatcagcgtcgagtccttgtacgagtcctcgttgagggtgtccagctcggcgatggcgtcgtcgaacgcctgtttagcgagctgacacgccttgtcgggtgaatttaatatctcataatagaagacggagaaatttaacgcgagccccagcctgattggatgtgtgggctgcattttcgccttgctgatctcgaaagcgtcctggtaagctttctgtgagtcctctacgacggtatttctggtttctcctgtggccacttctgcgaggtacctgtagtaatctcctttcattttaaggtagaatactttactttctggattactagccttagggattaggtgtttgtcaagcagacccagtacatcatagcagatttctctgagctccttttctactttaaccctatattctttagccatctgttgttttctttcggagccttcggttttctgttcaatggaggagatgac

SEQ ID NO: 1499 - DNA, 522 bp, Plutella xylostella
ctccatggcagaagcacttgcagattatacgcttaaatgcgaacctaaagtccttagaaaacaaggcgtagattagggggttgatggccgagttgcagtagcctagccagaagagcacggagaagacgatgggtgtgacgcactcgttgcagaaagcgcggaccacgtacacgctgaagaaggggagccagcagaacacgaacccaccaacgatgatgccgagggtttttgcagctttggtttccattctgaagcgtttcacctgcgctttgatatttcttttccccatccttctggttgttcgtggtttgttctcatcacattcatcgtaaaatggatttggagtcaagtggtgggatgattttactctcaatctgctctcggtcaactcgcggccatctctttcataatgaacggcataaagagatgggcttggagacctgctagaagacctggacaggtcgttgttggggcagatctgttccgatgaaggatacgacaccgatatcttcaccttttcgt

SEQ ID NO: 1500 - DNA, 520 bp, Plutella xylostella
ttttcttctctgttttcattaataacagtatacctatgagagtctttgttattttcatttaactgtttaagtccaaactgtttgctatatttgtcgttgtatgcagaatcaaagtcgatgatgttgttatcaaaatctccatcgttgccggtggtgctataaactatctctgtactgtctatgtatttggagaaggctgtagtagtatagtctaggattaggatggtaataaaggtgaaatgccagtacatctttcttctctctctgtggtacgagtacatgttttaagtggccatctgaattgcccttatatccagttttataaatttgtaccgagtaaaatttaatattccactgtcaacaatcctttcacatacactttaattttaataaattaattaaacataagttcttagtatgatcaaatacttttaactcacgcacaagatttcacgacaaaagtttattgaagtttcatttgtccgcgcgtaaactaaagcgaataatttcaaaatggcgt

SEQ ID NO: 1501 - DNA, 508 bp, Plutella xylostella
tatacttgtctcttgccccgatacataataaagtggttaaaagtgacaagaagtgagatacagattattaatagaacttgcacagataagtgaactttactaaccttaaataaaataaattataaataacatttacttatacataattataacttaaaactagtaatatatccgtgaatcataaattttgtaccataaaaaggctgcgccgatttagtcttcctaccactaaacagtaacattataagtctattttattctggagtcaatgaagttacttccgcaatataaattttctgaatccaatctcttcatttttgtaaaaaaaaacatactatcacaaatttacaaatagtcctgtgtagcacagaatattacataggacggtcaacattactcaaggcacttaactcccatacttcacaatgtctgaaactaaatatctgcctcctatataaataaggaacatttgaaggcaccaggcaatgtcttacattaaacagtttaa

SEQ ID NO: 1502 - DNA, 502 bp, Plutella xylostella
tttttttataattaaaagacaatttatttagtacttttttatcataccaaaatatcctttaactgtatggacacagaacagatttcacataatgctgggctaccagtgaagattatgctagcgatccgacataatgtagcgacagttttattagttgaatgttaagcacgagataatgtaaaatatacatagtgcattgtagcgttaatagtaatagtacaccataatgatattattactgtgaaatgtagtttttccttcaacgtcgctggcaaaagcctcgggtataagtaaatacaaacttacaactatgtgaccataacaacaaccaccatactcaagcacagctttagtataaaatcagactttgttttacaagaaaatgtccacaaagacaagttcattacaaaagcaacatgttgaagaaataaactcttatttcaagacaaacatcaacctaaagaatgctacttctgttaaataaaaactttaaataactata

SEQ ID NO: 1503 - DNA, 500 bp, Plutella xylostella
aacgattctacttcttatcgtatacgtcggtgagctcaaatttccatatcttgttgggtccaatttccgttacgtacaaatgtgagccgttccgtgttacagccagcgagtgtgggttcgtgaagcccgtggcaggttcccaagtgtccaatatgtttccgtacagagcgttcaccgtgaagcctcttactgcgatattctgcgacgtaggcccgttcacagcatagatcgtatccccgtgtgacgtcacagcgaatacccttcccaacgtgggatcctcaatgatcgtagctggatccatcatcttgatgtaacttttcagtccagccttcggacacacaatcctcatgttctctctgtctgccacacagactatgtctaagtgttctagtagagtcacgctgtgagggagattcaggcttaaagattcggagaacgtcggtatggcgaacagcatcgacccggcagcattgaatttcaggatttgattgttgcaatat

SEQ ID NO: 1504 - DNA, 499 bp, Plutella xylostella
agacaagaattgaatgaaaatgtgtgggaatcttttaaatcttatgttcacttgcaccaaaaagttaatcaaaattaaatctatgatctcttgctcagacattataccgtcaaagcaagacagcacttgatttaagtgcatttaaatgttagccaccttaactatcatttatatttctggcagaagcgctaagagaattgacaatattctatacaaatatcaatccaatcctcgtctcctagcctcgccagtggaaaacctaataacacactaatccctccaactctagaagtaatgcgtcatcacagccatgactgctatcccggcgagcagggcggcgaggtgcttgagagactgccgtttgtcctgctcccggagtaagtcaggcagcactgtgactagcgctatgtggaggaagccgccggccgtgaacgggactatccaggatgttttcgcctcaatagcattcctggctccactgaatatgactgcagtcatg

SEQ ID NO: 1505 - DNA, 499 bp, Plutella xylostella
ccaccgcccggtagaagttgaggcacactccgtaacgcgttttacccgagtccttatccgtaagcgtgaacacaaaggacgaggcatccctattggcggcgccgtggcttgcgcgtcttggccccaccgacacgcagccgtcgggctggcagaagtacaccatgtccagggggagagggaagtcatcgtggttggtgagcgggtagcgacgaagcaactcgggcgcctgtacaggcgcaaggccttttccggaggtgtagggtcgtgccccgacgatggttaggtaatccaccaatcgggggcacaggtgtgtcttctgtatgtccatgccgaccaatcacagcgcagcacacgatccatgccgcaccgatatatcgatcataattgttcacttgctatttataaaaccttatttaaagtttcgtcctcacggtggcacaaagactacatattaaactattcggccgcggagtggagcgcgttttacgtgttatacgcg

SEQ ID NO: 1506 - DNA, 499 bp, Plutella xylostella
actacgtgcgagtttgggctttgtagaccacttcgttatttaacccgtggtgtgcgttaaaacgaaacacaatgaaataaagttttcgccgcacatgttatgtaaataaaaagttaaactaatttaacgagtatgtttatttaacaaatacataaataaatactatttatcatacaacgaacactgtgcaattttattcaatccgactttaaaatgcttaaaaatctggaatgttaaggacgacctttatgcagatatggcggccatttttaatccatgtgatagaatctggggctcagatactgctggtttggtttgttggataacggggtcgatgtggacatcatgtaggcagggatgcgtcttcgatcggagaaagggctgatgcgcgagtaataccttcgttcgattaccttatcaaagaatcgggttagtttcacagagttgcttgtcccaggtgctagagatctgggttggtgtgagttgacgaacagctcat

SEQ ID NO: 1507 - DNA, 498 bp, Plutella xylostella
ggaaacactaataattgtattatgaatttgtaatgtctgaaaagctatggataattgaatgagaaatatcaacatctaataatatttcaaggataatattaaattctcagaaataatttatgaagtgagtgttatacttaacgtctaacctattcttaaaactagtattcgttagttcaagttataaaaaacacatataggtgaaaaacttgccaatgtttatcttgatttaaaaaatctggttatcccgtaaatggacagttctaataagaaagttgtcataggtaataaaactttactaattaataccaaaccgagtagttacctacatacgtcctatcgctgtacggaatctgttcggcactggacagcacaactcatttatgaattataaaccattcctaactcgctcattgcgcgactaaatataaaatacattaaatgttcagaaaatgtcttagctaatataggtaatgtagaatataatctaatcgtctt

SEQ ID NO: 1508 - DNA, 493 bp, Plutella xylostella
taattttttgtggtaaggccactaaagtctatattttttacgcaagcatattttgacttttacgaattgtcttttcaattattggcacctgccattttctcattgcgttttaggccgtatagattacaacaacagggttcattctcgtttgaagcgctcatggctgtgtaaatacgttttaagtagtcagcttacggtttattctaaatgacaataattacatcactaatatcacttggtgcgtgaagctatcacgcattgctgagcagctcgttggtcattaggtccatggtggataaaggccccgtcagaccggagcgggatcgagaccgactgagttgagctcttctttcagctcccgctaccctcgggttggccttcttccgcggccgctctctgctgaacgccgacccgctctgtagcgcctccataagactgtccatgaccccgtcctgttgccgctccatgtccacgaactgcttgtatctctgct

SEQ ID NO: 1509 - DNA, 491 bp, Plutella xylostella
cacgcgcgggtcccccctgtcttcatacagcagcccgaagtagtccttctccaccaagttgagcttgtcgcacacgcggcccagcagctcatggccgcggatctttctctcgacatccagctcgagcctccttggccacgctctccggcatgatgccgcctgaccttcaacacctgttgatcaacaagaccacattaacggcggataatagacccgaggagcagcaggactcactcaacacggtgttttcagcacgtaaacactgtagtttcacaatcaaaagggggaactggtaaataatgcacttacaccacgaatccacctttcttgaaacactaaacacaaatccctgtaaatagggtcctgtcgcttgcagttctaatcagaattgttcgatttcgggactatccaccaccgttttcattcattgcaaagtgaaatcatacgagacgaatggcagttgccgaagcccgaaaaaactggaagcgggc

SEQ ID NO: 1510 - DNA, 490 bp, Plutella xylostella
ttattgtcttaataaaagctaaagatctcacaacgagtttgacaaagtgagcgtccaagggcgatgatgagaaatatgggcctacacgatacgctactataaataaagctaattaacataaatgttcaaatgttcgatcagaatgtgacttcactttaacctcagtaaaaggcctctccattttatatacctacagatactagtttacaaaacaagttaggtcagctggatctattttttactggactttttgacatttccaaaggtataaattaaaaagttttgctagtttgaacataagcttttttaataaatattttaacaatttatgataaatgatgacgtctggactttctggcgaaaggacaaattcaaggacagtatccttgaatttgatttgaactaccaagagtatttttacaaactttctgttgccgtgtcataagctggggtagattttgtggccaaatacttgagagctctcgcgatt

SEQ ID NO: 1511 - DNA, 486 bp, Plutella xylostella
cttctctatgaataagggggatagtctctaagagtcttattttgagtattcataatataatatataaggcatacattgttttgcagattgcaatcaccagaaactccctattacctatgtgcatagcaatatatagcatacacatacttgcacagttcatcgtttgtcaacttgaaaattatcttatgatactatgtaaataattggttatgtttattacacaatgattacatagtaagttcgtaaatgaatccataaacgcagtactagaaactattaaaaattcgtcaaagcctctggttgggagcaagtcaaggaaaagtacgaccaagttattgctatattcatattttatatctgtatgtatcaataatattcttactgtgatagatacaaacatgttacatcacttggaagacgggcaatttagatatttgtaccacatacattattacaatattttgcgacattaattattcacattaa

SEQ ID NO: 1512 - DNA, 486 bp, Plutella xylostella
actaattactgattaaatgtactaaggtatttaatttcactgaaatgctttgaaattattaagtaggtatcttaggtagttatttttattatgtaaataggtactttctacctacgtaactagtacacttatgcaggttgaaaattcaggttcttttcctcagtatacgccgattaggccctatgttaagcctctaattactctggatcacgacaactcactcgttctgcagcagcttagaagtcaacattgtaataattaataaaatgataaaaagttcgtcaaactaatttaaatagctcactaccttcaaatgtctttacaccgacgtgtattagggagagcactatgagatcagtaggtatgctttcaaatttagtcactttgactttaaacaaccactcacataggtatacagcagcacgggtcccatatccacatagataaacgacatatccatatggtggaattaatcgagtttatcga

SEQ ID NO: 1513 - DNA, 483 bp, Plutella xylostella
cacactcgtagcactcgcgggatatgtcgtccggcatccagtagcgagccaactcggtgtccgcatagcgggtgccaccccctgaccctagtgccaccaggctgctgattctcttcaaaacattaggcaaactccgcccttcaaactcaaccgcgtaagttccagtctcggtcttttcctcatattcctgattattctgatcatccgccggctggctttgccccttgccctcaccttgggccttagtttgaagattctcactgctttcactgggcgaaaacagaggcagcttccagattttgttgaagaaagttgaaactccactttgtgacgattcggactcgaagcgcgggaactctgtgagctgggatgtatcgtacttgtccatcttgatgtacagtacagcaccgtagcttattttccttgtaaaagattcattaaagagagaaattgaagaaaatactaacaaaattcgcagatttt

SEQ ID NO: 1514 - DNA, 483 bp, Plutella xylostella
ccgcaggccaccgtacgtttagtagtaagggttttacaataactgtaaacggatcaagtttactatttctactgccattttctctcagaagtttctgatagttcccgctagaggcgccactttgtatgcgagaaagcctaaacttataacatagtttaacatacataggtatttaaaccaactatcaaaatatgccttcttacaggaaaactatttattatttaacaatcatcttcatacgttgatagttcttcttgtttcacatttaccttgaactggtattgagccggttctcataacgtgtccatattgtgcagttgggtggctaggtagacagccttcactcggtctgctagttcactcgctgagtagccgagcagttgacggagatcgcagacgaatttgtagacgaatcgtttagccggcactttggagatcatgtctccgtcgtagtagtagcgcagcgcacgagataacttctcg

SEQ ID NO: 1515 - DNA, 481 bp, Plutella xylostella
catcgtcaatgtgtacttgaaatcacagtttcttaataatattatttcataaattcgatcacaaaaagtgttttaaaaaatacaattaaaataataatacacgtaggtattcattaattacattttatcattaaaataggcagaatctaataagttacattttaaaaaggaataattatttttaaaacacaaattaataaaatagtaaataatgataatagaactactaaaaacaggaacaattttatttaagttgtatcgaccacttgatttcagctagctaagttaacttctgcgtttatccagcaacaggatagacgaaagtcttggccgtggcggtgccgaagtggttggtggccgtgcacgtgaagtcgcccatgtccgcccacgccagccgcgagatctgcagctcgccggagcggaataccctcatcctagcgttcttcttccgaaccacctctccattgttatccctccacac

SEQ ID NO: 1516 - DNA, 477 bp, Plutella xylostella
cctccgatcggctggaactcattcttgaggatatgctccttgttcaccgtgtcccagatgcggatcttgccagacgcgtctccagatgcgatgtagaagccgctgggggagtacttggctacgttgacttggcacgagtgctccgtgtatgtatccgcaatcgcagggttctctatatctcttataataacagagttgccgttggtatacaaaaatgtttttcccttcgggtctccgccaagaaccagcggcgttccacgcgcggtcctcggcagggcggcgaaagtatacttatttgaatacgacattctgctctaatactttctatgtataacactacactcactacactaaactactactttaatcagtacttatcaatttatttgaataaataacaatcggccgctacaaccccatagcaatccaaagtgacgtatattttttcttgctcaatgttggcagcactgattttca

SEQ ID NO: 1517 - DNA, 476 bp, Plutella xylostella
cacatccacgagggcattggagtgtttgtgaagagctacagatgctgagggtttgagcagctctctgtctattgttgacagaatcctcacatagtagttggatcccgtagtactgcccactatgccggtgttctggtcaacagcttctaagaactgtccaatgactagcggcacagactggatccttttgacttcttcctgtgcatggaggtattccttcttcaggttcctttgttcatcctttatgtactcttcttgaacttctaagaattctaacatacgctgtagcttcttgtattttgtgtacaggtcctcagactccaagtcatcgaatgtttgggggccagtaaaagctatgcattttgcatctacgatcggatcgtccttttccggcaagataataccaatttcttccatttttatacaaaattctgaaaaatagcacagtgagaagcaatttttcaaccaaacaaaat

SEQ ID NO: 1518 - DNA, 475 bp, Plutella xylostella
ataagatgcctttgagtagtaaataatttaaagacaattcctctcttaagtaatatcacactttatgcaaaagcatactttcacttttaacatttattaagactgagtcaaatcacaaagcttaactgtaaactaaaccaatacaagttacagaatataaataaaaccaatatctacatacagacagcttgttacacaatgacataatctaaccgtacgacacacaacatcaaatacgtacagattcgtgttgcatccggtactctgaggcactctcgccgcctttgtcatcattgttcttgtcccaatccacttctttcttcaatgacaagggaacctgttgtacaggtggcaggccagaggggcccgctattggttcattccttgggctggagagttgcgtggtgtgcgagggatgcgggaggccaggatgggctatcgcattcagtacactcagacgctgttccggagagaa

SEQ ID NO: 1519 - DNA, 474 bp, Plutella xylostella
gtagatctttgcgttcgcgtaacctaatttgatggtgatattcctctccagttcattcttgaatctgacagtttggactccggagattgccttgactactgttgactttccatgggctacatgaccaatggtaccaatgttgatggtagcctgccttgatataacttcaggtgatagagccgatagttttgtgacatccaattcggttagattttgctgacgcaagttcgactggggattcggattacgaccatcactcgatgccatgattggaagacagattaagttactgtcttagtagaaaactatttaacttcacaaaagaaggacaattcacgcttgttttcaccaaaaattggctaataaatcgaaaaatctttcacaatcaagttccttttcgtagcgtgtcgtcgaagtcaaaattttggtgttgccaatataaaaaaataaagccggcaaggcaaacgacaaatg

SEQ ID NO: 1520 - DNA, 473 bp, Plutella xylostella
acgccacggcctcgtcggggttgatggacttgttcagctccttgccattgaagaagtcctgcagcagcttctgtaccttggggatacgagtggagccgccgacaagcacaatgtcgtggatctgggccttgtccatcttggcgtcacggagcgacttctcgaccggctccatggtggaacggaacaggtcagcgttcagctcctcaaaacgagccctggtgatggatgtgtagaagtcaataccttcatacagggagtcaatttcaatgctcgcctgggtggaggaagagagagtcctcttcgccctctcgcaggcggtgcggagtcgcctcagggccctcttgttggtggtgaggtccttcttgtacttcctcttgaactcctgcacgaagtggttgaccatgcggttgtcgaagtcttcacctccctagtgagtgtcaccggcggtagactagacttcaaagataccatcc

SEQ ID NO: 1521 - DNA, 472 bp, Plutella xylostella
ctgaaaaataactttattctaataattatacttatctcacaattcacagaaatgtccccaagaacaagctgcaaacaaatgttaggtttcagtagttacctaatggaattatcttaaatttcaatagtgatattcttacctaaaatataaacaccaaattagtcactagatcatgttctaaaagcttagttacaatgatgcttgaataaattgtcttctcttaatctgcaaaactgttactgtagtttaacacaatacaaatctgtcttaaaattaaagaaatgctaacataagtatgtaatcaagttgtacataagtatagtctatgtaacaatttactctttgaaataaaatcattgatatacattcctatcatcctgaagtcaaacaaacaaatgatatgaaaactattttcataagtggcagtttaatcctttgctggaacttcaatgactcggggcttgtcaataat

SEQ ID NO: 1522 - DNA, 471 bp, Plutella xylostella
taagcgcaacgagcagtgtgacggtctcgacgctgtagtagccgcggtcgacataatcccccatgaacaggtagttggtgtcgggcgagcggccgccgatgcggaacagctccatgaggtcgtggaactggccgtgcacgtcgccgcagacggtcaccgggcatttcacctcctggacgttcgactccttcgtcaggatctccttggccttgtcgcataacgttttgacttgattttctgtcaattgcttgcattcatttagttgttctatccattgatccagttcctttagcgacgccttgtcttccatgttgtgtgtctgagaattaacgtacaagacgttaattgtgttttgaacgtctttaactattaattgtacacaaaaccatgcgaattctataatttacactgtgcccagaaaactgactacggcggaacttacaaaatggcgtaccacttgagtgacgtcag

SEQ ID NO: 1523 - DNA, 469 bp, Plutella xylostella
ttgccacgcaggtgcttctcatagttgttacacacctttgaacttttgcattatttcagtcacaatatttttatatctggtatagcttattaagcaaaattaccttttacaatatttatgctataaagaacacccctataaaaaaataaagtagactctaaacatatttttgaaaggatacatcaggatcatcaccgaacagcttcaagtcttaccttaaactggaccacctttccaaatttttcaaactcaggtaagacatcataaaagaagtctttaaaatctttataggtgtcattttcttcatattcaagcatgaggtcagtgtcatattcattataattagaattttccaaaccgaaatgtgtgaaaaagtttgttgccagaagtgttttagctattcctgggtattggtggtttcgtgagcactggtcagcaaagcgacagcaggcagtcttgtagaagaatg

SEQ ID NO: 1524 - DNA, 467 bp, Plutella xylostella
cgccgccgcccttgcctcccattcctccggcccatgtgttctgcctctgggctagtgatactttgatggtggacccgttaaaaggttttccatcaaaccattgtatcgccgatgtagcggcattggaatcttcataggtgactgtagcctcgcctttaggttctccagtggctttatctttgtacatccacacttttggcttttgggttttcttatcagtcttgatgataccaatagagccgaaatgttgacacagctcgtcctccgtagtgccggggtccatgccctggatgaagatggtgtcttcctgcgtgaccatgtctccgctgctgccgcctctatcacccccgaatccgccgccaccgccgcctttattataacctccccccctgccgccgccaccatagcctccatctctattccccccatctctattgtagcttgagcggtcacctcctccatagcca

SEQ ID NO: 1525 - DNA, 466 bp, Plutella xylostella
ggccacagagcctccagctgatagttgacagaactcgtagagaccatcgaacactggacaatcttcacccacgttaaatctttgcatttgtttgttgtactcggacatgttgtctggtctgatggagcgcaggaagcggatgtagtcgtccgagtggaactttgtcatctcgtcagcagtggctttgtgtggtcggtaaatttccatttttctgtataatccatagttgagcaggaggttgtgcgtcatacgtatgcggtgaggcttcatcgggtgtccctgcccatagtagtagttgccaatgtcactatcgtaataatagcacactcttttcttgctgtgtggttgcatagccatttcgcttattaaaataacactaaaaagaagttaaatcacaaatattaactatttttgagaattttacacaacacgactcggtaaaccacggcgccaagcgtttttcttt

SEQ ID NO: 1526 - DNA, 460 bp, Plutella xylostella
tggtctataaaaatcttttattaaaaatcactgcaatgttgtgtaatatctagtgcccagtcgtggcatcctaaacaagcgataccgacctcacacggcaaatacagtaacaattactctatattatatgatcttatactctcgacaagcgagactcacgtacattaaactaaacataagcacaatcgaacgaacaaaatgctggtaaatgattgacaaatacaaaataaatacatgtacatcattcgaaatagattggtgaggaatcaaacgttcttacacgaaatagaatacatataaagcgcgccgcccaacaagcgcgataaccttaagttttaaaattttgaaagtgttaaatatgccattttatagatcttccacataccgaatcctaatacacccgtcctcgttataactgtacctataattcttaataagtaagtcagtcctagaactgttt

SEQ ID NO: 1527 - DNA, 459 bp, Plutella xylostella
gcgctcttttgcttttttctctcttataaatttgaaattcgaataccttttttcttacaaagcgccgatatccggatacatgtggggcactccggttccagtctccttatactgcagggggtctgctctgaattcaacagtcttcagcggtaaatggccatagactttagtgaagtagtttatacaggctgatcgtaaagtcatgtggcgggcgtcggctgacagcatttccgtgttcgtgcattccggacacttgaatttcttacgaggcgccaccttgataggcggttgcctggtgacattggcgactaggaagttgatagctatatcctcgcaattgaagtggtcgtcgacccaggttcgaatctcggccggcatcttgtacgtgtagtaccacgaccacagcttgtggtggaacgctgcgcctgttagcaccatggagatctggttggtccactc

SEQ ID NO: 1528 - DNA, 456 bp, Plutella xylostella
ttcgcccccggggttcttgtggtgcacgaggctggacgtctcaagcggcgcctgcgcaggtgcgcccgtcgccgcggagaccggtgcgttctgattggccagaagagaccccatccccacatactgccatccgttgttgactcgtatcagcaaggattgctcctgtatgatgtaggccagtgtgcccagtggactgccggtgccgagccgcagtaacgagttggtagttttgaaaacgatagttcccactatcatgcggccgtcctcgtcttcgtcgaagtcggaattatcgttgagagggtccgtggggtctcggaaaccgaattgttcttcccggtattggccaaagttgtttaaacttcttagaatttgtaaggcgtcgcgctgagttggtttgcctggcattttgctaatgtccgggctatctgtcaatgtagcatctctgttccccggtgg

SEQ ID NO: 1529 - DNA, 455 bp, Plutella xylostella
gcaggttggggaccttgcggaacagctccagcccgggtccaggtcctccttgagtgagatcgaagacctgtctggggttgaggagccactggaacttctgcagcagcttggctccctggttgcccccactcttcggatttataaacaccaacaccggcttgacctccgacgtcggtatcggcttgatggcaaacgtcttttgttctgatttcatatctttccctttctttttggacgcatttttcttcttcggcgatttccgaagcgacgacttgaagcttccccgtctaggtagttttactatccatgacggcgggactattatggcggattgtgaacctaaacagcactcctcccctatccgctgcaggttgaaacagctctccttgttgtggtaggcgtccttgcaccacgagcagctcagcgccacgatctccttcgagctgaacgacagc

SEQ ID NO: 1530 - DNA, 453 bp, Plutella xylostella
gcgcgcccacgccgcctacgatcggctccatcacagtacggatggcctggacagcgatgggggccaacagagtggagtgctgggacaccaccttggagttcagagatgtggccgccgccttcagcagaacctcttcattggacaagtccacgggtgtggccatgctttcaatcacctgtaaagcagatgtaagagctttctggaatccgtctgaaatgacggtggggtggatgcccttctgcagcagcttctctgcagcgtcgagcagcgccccggcaatcaccaccacggtagtggtgccgtccccagcctcaatgtcctgggctcgtgacagctccaccagcattttagcagcagggtggatgacactgatttgtttcagaatggtagctccatcatttgtgattgttacttcaccatttgcagcttggatcattttatccatgccccttg

SEQ ID NO: 1531 - DNA, 453 bp, Plutella xylostella
cgcgcagagccagctgatcgaatgtcaggatctctcctccagcggccaagatgcgggcacgggccttctcggtaacgtgcagagcggcgactgacatcttaggcaccttgtagagcctcacatcattagtgatggttcctaccacgacggcaatcatgccctcgcgagtaggcttcttcatgtgacgagccagccgagacaacgatagtggaggtcggttgatgcggctcatgaacagcctacgaagaatgatcgtgttgaacttggagttcgtacggcgagccaagtacctgtatagttttacaagtaatctcaggtacacatcctgagacttgacttcggtgcgcctaactttcctgtcgtgtttatggttgatgtcgatacccatcttgacaatcggatgaaaaagagactatagacaaaaaatattttgacagtttgccttttctcaaa

SEQ ID NO: 1532 - DNA, 451 bp, Plutella xylostella
ctttgattggatgaatagtcagttagtaagtttgacaaggtatctttaaaagtgtataaccacttatgaagctggctgtaccacacgttttacatgtccatgtacttctttgaggatcaaacaaaaaacctagggaacacttagatttgagtaagtatacttaattctagagcgatggctgtagttactgtgtggttgcggacccgttcacttgtttcttggcgtggccgttctctatgacagttttgtcgtccgcgagactcaattccgatactgatagatcttcttcgtctgagctgacatcagattgatttctggggctaagtctgcaacctttggacaggtaactcttcagtttacccagagaagctaatatcaaccccaagaacggcgggctgggcgacagcgggcgcgacaggtactcggggtggaactgcacggccacgtagta

SEQ ID NO: 1533 - DNA, 450 bp, Plutella xylostella
gggtcttgaaaaatgcgtggatgtacaaaatattatacctctaagtactaaaatgtggtgaatgttcatataaaaataagataaattcaaagctattgtctttgtcaacttattatgcgtcatcttaacctaaaaacgaaataaaactattacatcaaccaaaaacaccttccatacttttccattgcaactatttacacgggcaagatatcatagcatttgaacattttcaacacaacttatttatataaaaatagctcatgtttcgtaagtgataaggtttatttggccctgcgcgtcctcaggaccagggcgatgtaggccagtagtctgaaccctatgaagaggaggatcatgttcacgacgtccattgtgaagtctttctcggagaagctaagcgtgtccagcacgacctgccctgaagccggacaggtgaagttctcccgggtg

SEQ ID NO: 1534 - DNA, 449 bp, Plutella xylostella
acatgccgcgcacgggccttaacagtccttcagttcgaaccatatatcgaaacgtctctgtgatcgtgctattgtgtgcgctccgtaaagactgcatccgagtctttacggagtccagcgggtacatgatgcagtgctccatgatccccgctatggctccagcagtcatgtgtgtgactgaactttgggttggaagggtttcatagtcttcaaagttcataatactaactaatactgacacttagcacaaaataaacacaggttcaggatgtaagcggcggtgcaactgaattttacctaatccgcaatatcattttcactgcactattttcgtatcaaagtcatcagaaaattttaaataaaatttttcaacacaactcgcgagcgcacacgagaaattgcgaatcgttcaatttttttctgattatattttgacgtttcggtttcgt

SEQ ID NO: 1535 - DNA, 449 bp, Plutella xylostella
cctgctcctggagtaactgcagctcctcgcgcagcatcctgaccttcgcgttgagctcgttcctctgcgcctgcagtcgccgcagattctgggacttctccgccacgataagttgaagctcctcgatcttagtgatgtagtagggcctgaagccctcccccttcacggggtccacgtccatctttgtaatggtcatgctggagctttgtttaagctaccacatgaaaggatagaagtgagtttcggaagaaattatgaataaaatcggcacaacaatcctaaccactcaaacaaatattttccaagtcatgattttggggttgccagtaaacaaaattaaataattaaaaaaaaacaatgctaatagtgatgggacatgaggcaggatcatgatcataaagtttattacttctatggtcaggatcataaagttatagtcagcatccagc

SEQ ID NO: 1536 - DNA, 449 bp, Plutella xylostella
agctggtcagagccaccggtgactatgcagactctgagctttaatgactggcctagtatgctgaactggtctgcaatttggtatgccaactcatgtgtaggggtaagaactagtgcaaatattccatatgggtcttcagcgagatgttgcagtatcggcagagcaaatgcaaatgttttccccgagccagtcttagcagccccgatgcagtcatcaccagccagtatccgcgctatacaacctttctgaataggggtgggtgacttgattcccaatgaatgtagttgtttgattagccatggtttaattcctaattctgcaaattctctttcgtcattttcatccatatttaatacgctgaaattgctgatcaatattgaagaaagcgcgaataacttgattttagatcaataagataccaaaacaacacaaaatctgcacgtgtttga

SEQ ID NO: 1537 - DNA, 435 bp, Plutella xylostella
ccccgaacactcgccccgtgtagaagttgtcgcggtcaacatggactgtagtttctttcccatcaccatctactgtgtaagctttgaaattcgaatgcaagactgagctgtgggggtgcaggatcaacctgaagtctttgcccagggtcttgaagtgtaactcctttatagtgttgaatggatgattggaatgcttagcacccctcttcacaatatgatggacgaaactagacgcatgaatcgtctcgaaatgcttcaaattacggtaaatagaaccctttatttcgccgctgaatgaaagtagaaataagaaaggaaaaagtatgatgatctccattgtatataatcttaacctctattgtcccactgctaatataattatgggagtgtaatcaactattgcaacaataaaatgataattaattatatgtttat

SEQ ID NO: 1538 - DNA, 433 bp, Plutella xylostella
ccccggccgagtgcctcccgcttcctctgcgcgctgaacagcctcagctccttgcgctcctcgtcgctcagcgagtggcagtagcggacctcgttatcctgcgggggcagctgctgcaacagctgcttgagtcggtagcgttcgccgacgctgttcacatagggaaccttgtcttcaggcagcgcagagaagtacaggtgcacctgttcaggccttaatccgggcggcacccacgtgtactcctcaagcgcgcagcccgagtcgtcgtcgctctgggaagggaggggtgcggggagagcggcgacatggctgattgcggcgattgagggtaactcggcgaatgctgactgctctgagggtagtctcttcgctggtagttgtataggtgtggtgagctggactggctgggctggggcgaggcggggtagggcgg

SEQ ID NO: 1539 - DNA, 574 bp, Plutella xylostella
tatctttatatttaaatctgaaatgatcagtcatttactcgaaacgaagccagacctcaacagggttcacataacacaagttgtccttaaaataaacattttattaaaacacaaaaagatattcaatgagaaatgccaagaaccatttatctgttctcttcttaattatttggacctttttatttctagtttttcaattacttaattatatctgtaaaaaataagataaaaacatgattattttcaattcattgcaggtaaaattttgaacaaattgaacagaatccgaagtatattgttaaaaaaaacgtgcaaattataatttatttccactaaaatgctcaaacaactactttacttctttgtaataaaagctctgattataaatatctgtgttttaatgtgaaaataggattactaaagtacgcttctaaagagacttgatgacgtctttacaatatggtttaatacatacacagtaagtaactaacataactgagactctgtaaacacacacactactccagtaatgcgatttccaaactaaatcaacacattgatatttgtattgaga

SEQ ID NO: 1540 - DNA, 505 bp, Plutella xylostella
ttcgctcctcaaaaattataacaaaataaatatgtacatattttttcttcaattacaaaccaatcaaaatcttgtcacaatacaaacaagaaccactctataactaatggtgaaatgcaccaaacatttaaatgaaattgaatgtatggctctcttactctgacattataggtactgtcaaagcaggacagcaatagatttaatttcattgaactatttggttcaattcaccctaagccctaatttcatcatactcggttaaatcataagcagggattagttgttggcttttgtcacatctgtcaagaatttaatatgaagatgacgtataattgatgaactaatcccttatgttatgatctaaccaagtatgatgaaactggggcttagattacaaaatacactatcgcaacaaatatacttaatataatattatttttgttgcaatatagactaaatcatctcctataactgagataacatggtgcactatcgctcgatcatc

SEQ ID NO: 1541 - DNA, 548 bp, Plutella xylostella
caacaattatttacaacttcttaggtattatttattactatgtacataaaaactatgtaggtgcattatatgctagatatttgtttatatgtgattttacggcatgtccacagggtccgtcacgattattgttacgcagtaacgatactgaaccttaaaatgttggttggtttactgaaaatataaaatttacaacaatatgatttaaacaaaatacataaacatattgttatatatatatagctggtggatgaatatcaattcatacatgaaataagctattgagatgtctggaaagtctatcccattttaaacattcactgatatataggatctctataaaaatcctcggatcagaaaacagctattttaatagaaaaaaaaagccattttaatttatgcgtacaattgcatttgtctctttccttcactatacaaccctcaacttgctcttacttatatttaaacattcgaacattacagccttattataaccacatcccaatctacaccccacacaaacctcaaacttcaccacttaatattaa

SEQ ID NO: 1542 - DNA, 598 bp, Plutella xylostella
cccacactgaaatgttcacaagacataatacagaaactttaccagataataacagcaacaaaatatttcttactgcagtaaaaatattttataaatattttgcaattccagggtatcctgttcaaatatcacaaaaatcaaaacctcttatacatatatttatcacttatctctaatcataacgagatgacaaaacaaattacaacttattcctaactagcaagcctgactattgatggactgtgttgctgtacaataagtatattttaacaatacaatctcatttacagtacaagccacactgccaacctagctcacacaatcactagcaggtggtgtatcctgcgcttctgagactaaaaacagtcaagcaggtggatcctgtcatgtgtattgtttgtaacatttttgcagattttgaggatccacttgtagtataacgtgtagtgctcattgaaaatccacaaatcgcagaaatatataactagaggcatttagaatgaaagtgtttcgtttggtgcttcatgtgtcgtcctcgaggaagagaatggaggcgatgttttcacatatttctatgcacacttataaaatcattaat

SEQ ID NO: 1543 - DNA, 449 bp, Plutella xylostella
ctccagacgcgatcttcgctcctgcttcttgactagtagtaaacagagagaacgtctcgcatttaatctcttgttccgtgagttctccactcaagatataccggtccactataccaatggccgctgtatctgtttcttccaaactcgtcacgttttcttccttcagagcctttcttctcttagcaacaatgtctgaagacaagtcgtctactatcttgacgtagtattgttccttggctttagctcccaccaaatagtaaatgattaggatctggtaaaaccatcgcgtcatcttctggaaaatcagcgtgtacatattcggtgtttccttcacgacttcagcgagcctgtgcacggattgtgcatcattcttcgacagccccatcagtgttcggcaaaccatctgcgtagtagtctcaaccacatcctcgtaaacattgaaggtcttc

SEQ ID NO: 1544 - DNA, 458 bp, Plutella xylostella
ccaccagcccgccgatcaggaaacacgccacttgacacaacaaaagaaacgacacgagcacggctagcttacgcccgctcaggttctcgatgattgtgcccgtcattgcgcaagttgatcaaccgccgatcatttataagtttagaaaaactgatgtgaaaagaacacgattatatttccattgttcttgtttccgacgcgaaacgaagcctacgagagtgaacgaaacttgacgcgatcaatttgacgtttctgacatgcgcagtaaatccggttgccagcgtaggaacgaaacgagttttcgaactcgttacaaatatctcgttactactgtaactcgtttcgcataataaaataaaaacagtttttatcgtttatcaaacttaatttgaaattagttttaaatatgcatcgaagtaatgccaacacaactataactgtaattaacaatccaatac

SEQ ID NO: 1545 - DNA, 598 bp, Plutella xylostella
ataccgcgcgaccggattccaggaatacccagtccagcgcaaagtccacctggcgcacaaacggcgacagtctccgcaccacggtgttcgctatgtgcagcaccacgctcggccgctcgcgcatcatgctgtatacggcggtcttggagaggagccctatgcgggagaagtgcttcgctctgatggagaagaagctgggttcgccggttaggacggcgagcccgccttctacttcgcctgggtatgcagtgaacatgtgcacctcgccctcgccctcagccaccctctgggagaccaccagagcgcctgacagtaagtacactagggcaacgtccttatggctctcctccttcatgatataagtcccggcgggcaggtcgcgcacctgcacgacgcccttcagcagcttgtcgtcttccagacctagctccttgatgaacgcttctgtcgctatctggattagagcctgttcatccaagttctcattttggttgtgtctcttgaacgatccctccttcctctggaaagacgacgtcggctgcacgtctggttgctgaaagatacataaacaaactgtcaaatcaaaataataacacaa

SEQ ID NO: 1546 - DNA, 485 bp, Plutella xylostella
gccggccccagagcacccacaggtcttcttctccgccggctgaactggtagtgcgagtttccgtttcatggctggagctggtagctgaggcgagcgatatctgcgaagtatcagagttcttgcggctatgtacggtcggcagcgaggggcacttggcgtccgcctcgatcagtctgttggcctcctccagtttggcgagtagcgcccgttcgggcgtcgggatctctgccgcttgcagcaccgggcaaccttttgataaatgataagttgaaattgctgtagctggctcaaacattaaatgatttcgatttcataaaacacagggaaataacgcttggtgggcaccgcttacttagttacatttactgataaggttaaacacacggtataacaagtaaaagaaaaggtgccgcccagctggcaaagaaaaatccgaaataatcgaaaaatttggcgatggcgaccacacacacgcacacaaataa

SEQ ID NO: 1547 - DNA, 477 bp, Plutella xylostella
gtaggtacttatcctaatttaatatattttgtacctagtacctacctgcgtcgtcgcgtaggtaagtacacaatcgtcgtagtaaagtacaatagagaacaatttgtttttctcgaattgtttgttagccctgaaaagggctttttgttgtgcggtattagcgcactcaccgaccgtggctcgtgtgttcgtcgtccgagtgtagtcagtcgcccattgtgtgcgtgtgcgtgcgtatcgagtagatgatacaacagcgcaacaacaacaccaccaacggtgccgacgacatacggcgcgaacacgatggcgcacgttcgatggcttcgtgtagtcactgcggcggcggcggcaagcaacacaacaaaaaccgtcgtcggcttacttcttgccggcggcggaggacttcttagctgcgggcttcgccttgggagcggcagccttcttcggtttgggcgccttcggcttcttagtcgg

SEQ ID NO: 1548 - DNA, 449 bp, Plutella xylostella
tgtccacgccgcgacgcatgaacgagcgggcttcatctatctggccaagactcaatagttctgcagctctcttcttagatatatctctggactctctccttttagcttcagtcatggctttggccggcagatgtcttccatcaaacaccagtataggcttaatattcttggagagcagcatcgtcacatacttcaagcagtacttgatatgtatatctgtttcttctcctcgcactattttatcggcacaggcgaaggctcccttgtggagccagcagtatgaatctatggccacagtacaaccactgaactcgtcaacattggctcgtcttgatgccttctccaggaagggaatcaaacctgtaatacccatggtaaatccctacaaaaacttcatgtatgactgaatttcaagtactgatagaagatgttgaagttatctttagcta

SEQ ID NO: 1549 - DNA, 570 bp, Plutella xylostella
atcagctttcatatagatgatgatacaaaattaatgcataattttcccacaagtgagatcattactcaaaccacaaacattatacaattcagacctattcatttatgtacttaataaacactaggtttagagtaggcaccagtaaacaggaccacttcattaactttatccacaatcatgtataagaagggcttttgagctacaaactgttctggcatcaatcgtgaagagaatccagcttcagacactgcgctggccacagtgccctcctctgtcacttcaatattagccttctgcagtaaagtggacacatacagtgcctgatcagatatgagagggaaactggcttgttcatcaaacatatgcgtgaggcccatatcttgcagtaactccactaaaaagtccaagttagattcgattttaaacctcggcagttgcaccatcacagtccttgctggtttcttttcatagaggtggaataccgactgcaagttgatcaagttaagggcttcaatcacttggactagaggcacgtctgtgtacggcagaaacacgagcatcgagaatttt

SEQ ID NO: 1550 - DNA, 594 bp, Plutella xylostella
ttcttagtctgcctgctagtatcaataattaaataacataaaagttttttggccatttcttcctgatataggtacctacttatatcataatctgataacatctgaagctgaagtaaaacgtcataggtacctattagtattcttttctaatctagctcataatcttataaataactaattacacatctacttaaaacataagtacatttacaagttaaatttaattatttataaatactattcttatgaacatcgtgactccaacatatcttttctgcatatcgctataaatattaaaccatattaaactgcctgaaaagttacacatacgacgttagccaattaattacgaactaaataaagcaatttttttaaaggagtagttacatacatatatcaaaatatattatgctattgggtccagagtgtagcaaaatatgctatttagcgtaacacgtgatggtgtgggtgtacattttacaaaacctatgaatgtgtactaatatcatcatcatactgtagataactttgtaccagatcccaaacaaacggaacaacagtagcgccatctaaccgtcacattcaaactagtag

SEQ ID NO: 1551 - DNA, 598 bp, Plutella xylostella
attgcttgacaatggggaagaaaaccaagtgaagctttggcagcacaatcgagtgtgcctttcagattctgaccaattgcattattggggattaaaaatggcgattgcaccagggaatcaggcacacttgcctaaggcgccatctgtcatcatccattagcttttagttttcctgcccattctcattagttcgttcgtcgattgagtcaccctccagtctcactaacagcaacaaacagacacttggcggaccatcaaagtgtccgaattgtcctctgctaaattttgttcttttcggttagtctcaaatgttcacaaaactttcactgaccaaaaattacaccacttatattttctaatagacctttctaccagagatttgttttgcagctatgatatgaaagatatccgtggaacgacccagggaatatgattggtggatatcaaacacatccatagcatagcacatatctagtggaaaagcacccttaaaatacaatcttgtttcaacagtttttctgcacatacttatgtaatctcacttgtttgtaagatctcacggtaataataataatataataactttaatttaaatata

SEQ ID NO: 1552 - DNA, 500 bp, Plutella xylostella
ttgttgggcggcgtggagggataggtggtagagcatgcctagtgctgattgggctagcggatccactccagccagcatcatgtcagcagcgaccgggaggagcctgttcttcagcggccgaagtttgtcgaggaggctcttttcaggcgctaactcgccggagtcaattccttctagtccttgtttcaggaaatgttccattaagctaaaatgagtatcaaatgcctttaacgcctcattaaacgtatcgctccgccgcggtcagcccggacagggagcgcttcgtgagcgaacactgggtgggcggggcgtacctacgtgtgatatgtagcgcacgcatcgcatcaaaggtaccagttttctactatgcatccactgtatcggagcaaagaaagcgtacgataccgataagttgacgccattttttgatctgaggtggacgcgcttacttattcttaattgctataggtacatataatttgttaagaacctaccgagtt

SEQ ID NO: 1553 - DNA, 598 bp, Plutella xylostella
tacggtgatgccaaaatcctcggaaaggtgcgatccctgtgccaggacctattaggatcagtggcactgctgggtcttgtggtaggtggaagttaggggcacttctgatgaagaggtaaacttcgtctccaggcttacgatccatcaaatagtttgagcaaacaccataatgaaggggaccaacgccatcttgagttttgtaagagactacagcaacggtcagatgcaatctcttgggatgagcaagtggtgatgatgaaatggagtagaatctgggctgcagtggggagagcagggcagccagtagggacccactcggcctggcagaaggaaactgttccaaaacttctagaagggtcggaaagttgtacagacgccaatcttcataagctgcggggtcattagccagaagattcagttgtcgcctttgctcatcgttttcgcatgttgttgctaaatactgcagtaggatggtagtcggcggcgtcgtaatgtcaaggaatcgcgtgaatagatctctgacgctcacagccggcaatctctcatgtggctcccaagatttgactggtccactggaagtatgagtctccttcatcaa

SEQ ID NO: 1554 - DNA, 598 bp, Plutella xylostella
gttactacaactatcaaaatatttacaggtttcaagtaagtataaattcatttcacaacacaaaagtcgtaataatttaaaaaagtatgcgaaatggggtgagaaaacgaggaacagtgagtaaagcggaactggggtaaagttctcatagcaatgtcaactatacagagtggccctgtaagtagtggttcaattgtaacagggtgatagagcacatcatcactagtcattaattacagtagagtttgctcataataatgccagaaaaaaaagttttgacacctttgtgaaaacttaagcaaaaacgttactactacccatcacccagtctcatttggatcatgaatggcttacaggactacctgtaaatttaacagctactgctctttctagtattataagatggaaagatgctaggcatgccagggctcagacatgtctttcatcaatttcattattgagccgccaagcagtccgctttactccatgctcccctggtatctccggtcaagtcggcagtctagcagtagttgaggatctcattaggagcgcatggcttgttgcagcactcatcgaccaggccgaaaatgatgcgctt

SEQ ID NO: 1555 - DNA, 598 bp, Plutella xylostella
aggatgtctactcctgtgtctttatcaaacactttggtgaagtcctctgatatcagtctgcgcagttttaatgccttcatgaagtacttctcgtagtttcgagctagtaagaaatagtttccggtgaatattctggatcgcactacattgttgaagccttgtgaccgagatgaagcgtaaagttcctctgttgagtagtctttgtctgtgcgcaggccgtactggagcccgtcgtaccgcgccatgttgctggccacctcacactggttcaggatggagtacactgcgatagatatggaagtgtgcggcatggatactgacctcacttgggccctttcattttcaagcaaatctgcaaccttcctccacgtgtctaccacctcctcactcataccctcacagtaatactcttttggtattcctattcttatattagatagatcaaagtcctcttttatagatactggcttgaattcttttttaatggttgttgaatccaaatcatcaggcccagcgatacagttgaggactacggcagcatcttccacagttctagtgaggatgccggggacatccatagagtttactagaggtatga

SEQ ID NO: 1556 - DNA, 504 bp, Plutella xylostella
gtgcaatgaaaaacttttatttttcataattaattttacgataaactttcacacctacctaactacaggcaggtttttaggtatatatttttttgtattttttatatgcattgttaacttaactaagtaaattaaaaataaactcatgttaaacatcacagaaaatcaatctgaatatttaaacacaacgtcgcagaatcatcggtagtccgtagtagaaagcgtgtagtcgtttgtcatcttgtcggtagtatattattggtatttgagcagtcgtggttctaggcgggcgcggcgggcggcgcggcggtggagttgctagtggctgtcgacgtcgagtcatctggctcgtcgatctggagccacggcatccgcttttgcagctcttgcctgtatctcggatgactgatggcgtacacccacggatctacgcaagcaactattttgcatgtcactgctggaatcatggtcactccaggggtcaacagctgttggtctccgtag

SEQ ID NO: 1557 - DNA, 597 bp, Plutella xylostella
ggcaacaccaaatatttcttttcgtatttcgacaagtcaaaatgaagatcggactctgcgcctacagtggatacaagatctatcctggccatggaaagaccatggttaaggtggacggaaagaatttcacattcttgaactccaaatgtgaagctgctcatttgatgaggaggaatccccgtaaagtgacatggactgtcctatacaggcgcaagttcaagaaggggcaggaggaggagcaggccaagaagcgaacccgcaggacacagaagtaccagcgcgccatcgtaggtgcctcgctcagtgacatcatggccaagaggaacatgaagcccgaggtcaggaaggcacagagggaacaggccatcaagcaagccaaggaacagaagaagagcacaaaggccagcaagaagaccacagctccccccaccaaggcgaaggccgcccccaaggccaaggctgctaaagtgagtcagaaggccgcccccagggttggaggaaagcgataaacctctacaataaatattggctaaggcatttgttgtgtttttattctacattaataatcttaaagtgtagtttagaatcgatttaata

SEQ ID NO: 1558 - DNA, 520 bp, Plutella xylostella
ttcctacactgcagcaccgctttgctctcctcaaactccagctcaaagtcctcctggttgaccctctcgttgccgtacgcgaagaacacatcctcgtcttcgaagaactgctgcagagaggttagaggagcccctgattgggtgaacaccttgcggacacagcccgtgtctagcttcacgcagtctgtgatggctgctaacgcgtgttctagcgttggactgttgcgcttgtttaggacccgccgggctcacgcgcgccgtcccgttaccagtagtcgcactaccatttgtctgtaagtatcgggacagtctgtggttggccctggcgggtgagggactggctgcgtccagggactcgggtccgctcagtctgaatgattgcggtgtcacagcacttgcctcatagtccaaccgcttgaaaggttccccaaatcccccacaaacgtatgattgaccatcttccaggtcatctagttttcctatttttcgtccttccaaagagtatattgccctgactcca

SEQ ID NO: 1559 - DNA, 592 bp, Plutella xylostella
gttaaatataattttactggatttataacataaggtatagtaatgaatgatacataatttatagtacaacaaataatactctggtttgacaataaaaaagtaaattctttaggttttttctaattcctattttcaagttttaacggattagtgagaagcacttattgatacttaaatattaattttttgaaccatgataattatccaaaataactctttttttccatcaatttatagtaaatttttatagtaaatttgttattttatcataaagacaataacacgaagtatgtagttcagcaaaccaactcacttagtccctacaaacatggccacccagcctgttcctgcattattcatggtcgtcttaaacactatcttaacataattgtcttcactaaaataatcagcaggcgtttctaaacagtacgtagaaatcacttgcccttttctattaacgagctgaacataattttgttcacagagcttacctaaatcaaacactgcaaagtgtagatgtaatgttgaacctactggagtctctagttcccattcgcaagtagctattctacggtaaacatctggatacatg

SEQ ID NO: 1560 - DNA, 564 bp, Plutella xylostella
gatggggattaacctacatacatcataattttattatacattacagcattttgagtatcaattcctaggtttacattaacattttattacaacatctttccaataatacagggatattatatcaatcttgctgtcatagtcgggtctagttcttgtctacaaagtcgctagtgcagaggcaggccacggtgactggttttttgagggctacgtacatgtgagcaaggcttttaggcatgttcagtgatgatctgtcgtagttctctttctcttttagtacggttagctcatataagctgggctggcacgagtaattaggcgagcagagtttggtggtgcagttcctctcttcaacgaaccgcgggaagaaaccctcgccaaggtcttttaaccgtttattgtattcacaggagcagggcgggtccataactgcttcattatattttttgactttcgtgtccccacgcttcctcgtccgagtttcaacggaattgtcgagcaaaatgatatcattacggatcatattcgcatagtcaaaaatcagcgttggtatttcatcacttt

SEQ ID NO: 1561 - DNA, 451 bp, Plutella xylostella
attataataatcgaatctcgactaataaaaaacccattcaaacacattgttgttaataaattatcttatgctttcagatgttatcaaaatctatcgaatcaaagtgtatgctgtaaggaaacaattcaatcgtcaatttatcagtatcacagaatatacatgatgtaaaaaatcattccaattattttaataaacgcttaacttcgaagtacatacaatcaactaacttccttaactaactagtactaaccatacatataaagagtcgcaaaccagaattgcatactcacatgattattacacttgtggtatgacaagtcatcaacattctgccaagatccctgtcctcctctcataagctgcttaatttcctatgggtcaccatttgggtaacttcatcttgccacattcattcataaaacgcgctaaaataaaaaattctctatgaaaa

SEQ ID NO: 1562 - DNA, 450 bp, Plutella xylostella
tttatcaccaccagacttggaatcatatttcttaaacttctttggtggacccatgattgagagtggatgaaaatttatcagttgtaactatctgaaaatagagggcactgttttatattaattattatagcatgcattattacaacaatagttacttaagttaaaagagaaatacaaactatgttgccacttaccttgtactttaaaaatattatttctattgtaagtaaataatattgatatcaatcactaatatgttaaagaaataggaaataaaacacctttgtcatctaactgtgacatttctcaagaaaagcaagattagaaggcaataatttaggcttcaaagtatttttaaccatttgaatcctgtgaaatcagacatctattgtatctcatcatggataacagacaactctagattctataagactcactatatcctcctat

SEQ ID NO: 1563 - DNA, 597 bp, Plutella xylostella
tttaattatgaactatctgcaagacaatgttgttgtgtgtagattaagtttagcatagccctatacatatatttgaaaggtactttcagcataaaaatgaccagcattttggcttcagagtacctgcatgaaaaaaaattatcttaacaaagagcacttacttacttttgatttataaataaccattaaaatttaactgtatgataaaattattataggtacttaacttaaaagttaaaacgaaacactacaggcttttcataataggtaacatcaataaaagttaaataagtacagactaggtacaaacattgcacacaaagctttcagaaagcataataatacttttacccttaaaataagacattgacaaacaaaaatcacttataattacgttcagtggctctgtcgtctatatttttatcattagcataattctagttattcgtttcattaactagattgatccattcatctccttcttgtacaattggaagctagattacacatatccgtttacaaataggttgctcgtaactccaggaatcattcagatcacttcacacctaaccaactgtttggtaatattttgcataa

SEQ ID NO: 1564 - DNA, 762 bp, Plutella xylostella
gacatgttcgaaatggatgtgttcaatcgacaagtacacagataacaaatggaggaacttgttggtagatacctacagggtgattgcgtccgcagtgcacggacggaccatggaaggtaggcatatcacaatgtgctgatagttaataacaattgtcaattgacttagagtacaggtcttacagtaggtgggggtgagttacagttcatgcctcaacctcttcctcttttaccttctgatctcctggcttgcccttggaccagtctggttttttctctttgtcttcttcttcaagggtgaattccttctttttgacgaccttcaactggttacggaagttgaattcggccgcctttttctggagcttggcgaatttgttctcgtatttggacaccttctttagtgtgggtttgacgaatttgcctctaaggtcgttgacttgagagttcaggtccgagatctccatatcttttcttttaacgatgtattccagatcgaacttctcgtcttcgagctgtccgatgcgggtgtggtattctttgcaaaccctcacaagcgcatcttcgtttgcatcttcaacgttcttgggtttaccgcacctctcctcaatgatgcgcctcctctcggccgctttgcgttcctgctcctttttcagttcctcagcggctttcttacgcagcagcaacctgagcttcttcttcctctcaggtgtcatgaaacccttcttcgccttcttggctttggaggcctcctccatacgct

SEQ ID NO: 1565 - DNA, 1448 bp, Plutella xylostella; identical to SEQ ID NO: 361

SEQ ID NO: 1566 - DNA, 1397 bp, Plutella xylostella; identical to SEQ ID NO: 763

SEQ ID NO: 1567 - DNA, 946 bp, Plutella xylostella; identical to SEQ ID NO: 764

SEQ ID NO: 1568 - DNA, 603 bp, Plutella xylostella; identical to SEQ ID NO: 765

SEQ ID NO: 1569 - DNA, 964 bp, Plutella xylostella; identical to SEQ ID NO: 766

SEQ ID NO: 1570 - DNA, 800 bp, Plutella xylostella; identical to SEQ ID NO: 767

SEQ ID NO: 1571 - DNA, 1691 bp, Plutella xylostella; identical to SEQ ID NO: 768

SEQ ID NO: 1572 - DNA, 478 bp, Plutella xylostella; identical to SEQ ID NO: 769

SEQ ID NO: 1573 - DNA, 900 bp, Plutella xylostella; identical to SEQ ID NO: 770

SEQ ID NO: 1574 - DNA, 5216 bp, Plutella xylostella; identical to SEQ ID NO: 771

SEQ ID NO: 1575 - DNA, 453 bp, Plutella xylostella; identical to SEQ ID NO: 772

SEQ ID NO: 1576 - DNA, 911 bp, Plutella xylostella; identical to SEQ ID NO: 773

SEQ ID NO: 1577 - DNA, 438 bp, Plutella xylostella; identical to SEQ ID NO: 774

SEQ ID NO: 1578 - DNA, 471 bp, Plutella xylostella; identical to SEQ ID NO: 775

SEQ ID NO: 1579 - DNA, 769 bp, Plutella xylostella; identical to SEQ ID NO: 776

SEQ ID NO: 1580 - DNA, 2828 bp, Plutella xylostella; identical to SEQ ID NO: 777

SEQ ID NO: 1581 - DNA, 620 bp, Plutella xylostella; identical to SEQ ID NO: 778

SEQ ID NO: 1582 - DNA, 732 bp, Plutella xylostella; identical to SEQ ID NO: 779

SEQ ID NO: 1583 - DNA, 5630 bp, Plutella xylostella; identical to SEQ ID NO: 780

SEQ ID NO: 1584 - DNA, 1843 bp, Plutella xylostella; identical to SEQ ID NO: 781

SEQ ID NO: 1585 - DNA, 800 bp, Plutella xylostella; identical to SEQ ID NO: 782

SEQ ID NO: 1586 - DNA, 1567 bp, Plutella xylostella; identical to SEQ ID NO: 783

SEQ ID NO: 1587 - DNA, 787 bp, Plutella xylostella; identical to SEQ ID NO: 784

SEQ ID NO: 1588 - DNA, 1400 bp, Plutella xylostella; identical to SEQ ID NO: 785

SEQ ID NO: 1589 - DNA, 709 bp, Plutella xylostella; identical to SEQ ID NO: 786

SEQ ID NO: 1590 - DNA, 2523 bp, Plutella xylostella; identical to SEQ ID NO: 787

SEQ ID NO: 1591 - DNA, 773 bp, Plutella xylostella; identical to SEQ ID NO: 788

SEQ ID NO: 1592 - DNA, 1033 bp, Plutella xylostella; identical to SEQ ID NO: 789

SEQ ID NO: 1593 - DNA, 1335 bp, Plutella xylostella; identical to SEQ ID NO: 790

SEQ ID NO: 1594 - DNA, 5600 bp, Plutella xylostella; identical to SEQ ID NO: 791

SEQ ID NO: 1595 - DNA, 1254 bp, Plutella xylostella; identical to SEQ ID NO: 792

SEQ ID NO: 1596 - DNA, 945 bp, Plutella xylostella; identical to SEQ ID NO: 794

SEQ ID NO: 1597 - DNA, 1333 bp, Plutella xylostella; identical to SEQ ID NO: 796

SEQ ID NO: 1598 - DNA, 814 bp, Plutella xylostella; identical to SEQ ID NO: 797

SEQ ID NO: 1599 - DNA, 676 bp, Plutella xylostella; identical to SEQ ID NO: 798

SEQ ID NO: 1600 - DNA, 2229 bp, Plutella xylostella; identical to SEQ ID NO: 799

SEQ ID NO: 1601 - DNA, 1016 bp, Plutella xylostella; identical to SEQ ID NO: 800

SEQ ID NO: 1602 - DNA, 1021 bp, Plutella xylostella; identical to SEQ ID NO: 801

SEQ ID NO: 1603 - DNA, 836 bp, Plutella xylostella; identical to SEQ ID NO: 802

SEQ ID NO: 1604 - DNA, 545 bp, Plutella xylostella; identical to SEQ ID NO: 803

SEQ ID NO: 1605 - DNA, 1507 bp, Plutella xylostella; identical to SEQ ID NO: 804

SEQ ID NO: 1606 - DNA, 750 bp, Plutella xylostella; identical to SEQ ID NO: 805

SEQ ID NO: 1607 - DNA, 1433 bp, Plutella xylostella; identical to SEQ ID NO: 806

SEQ ID NO: 1608 - DNA, 538 bp, Plutella xylostella; identical to SEQ ID NO: 807

SEQ ID NO: 1609 - DNA, 736 bp, Plutella xylostella; identical to SEQ ID NO: 808

SEQ ID NO: 1610 - DNA, 1066 bp, Plutella xylostella; identical to SEQ ID NO: 809

SEQ ID NO: 1611 - DNA, 513 bp, Plutella xylostella; identical to SEQ ID NO: 810

SEQ ID NO: 1612 - DNA, 712 bp, Plutella xylostella; identical to SEQ ID NO: 811

SEQ ID NO: 1613 - DNA, 833 bp, Plutella xylostella; identical to SEQ ID NO: 812

SEQ ID NO: 1614 - DNA, 581 bp, Plutella xylostella; identical to SEQ ID NO: 813

SEQ ID NO: 1615 - DNA, 509 bp, Plutella xylostella; identical to SEQ ID NO: 814

SEQ ID NO: 1616 - DNA, 581 bp, Plutella xylostella; identical to SEQ ID NO: 815

SEQ ID NO: 1617 - DNA, 980 bp, Plutella xylostella; identical to SEQ ID NO: 816

SEQ ID NO: 1618 - DNA, 514 bp, Plutella xylostella; identical to SEQ ID NO: 817

SEQ ID NO: 1619 - DNA, 1362 bp, Plutella xylostella; identical to SEQ ID NO: 818

SEQ ID NO: 1620 - DNA, 705 bp, Plutella xylostella; identical to SEQ ID NO: 819

SEQ ID NO: 1621 - DNA, 513 bp, Plutella xylostella; identical to SEQ ID NO: 820

SEQ ID NO: 1622 - DNA, 1187 bp, Plutella xylostella; identical to SEQ ID NO: 821

SEQ ID NO: 1623 - DNA, 872 bp, Plutella xylostella; identical to SEQ ID NO: 822

SEQ ID NO: 1624 - DNA, 477 bp, Plutella xylostella; identical to SEQ ID NO: 493

SEQ ID NO: 1625 - DNA, 488 bp, Plutella xylostella; identical to SEQ ID NO: 494

SEQ ID NO: 1626 - DNA, 579 bp, Plutella xylostella; identical to SEQ ID NO: 1044

SEQ ID NO: 1627 - DNA, 568 bp, Plutella xylostella; identical to SEQ ID NO: 1045

SEQ ID NO: 1628 - DNA, 556 bp, Plutella xylostella; identical to SEQ ID NO: 1046

SEQ ID NO: 1629 - DNA, 537 bp, Plutella xylostella; identical to SEQ ID NO: 1047

SEQ ID NO: 1630 - DNA, 507 bp, Plutella xylostella; identical to SEQ ID NO: 1048

SEQ ID NO: 1631 - DNA, 491 bp, Plutella xylostella; identical to SEQ ID NO: 1049

SEQ ID NO: 1632 - DNA, 471 bp, Plutella xylostella; identical to SEQ ID NO: 1050

SEQ ID NO: 1633 - DNA, 427 bp, Plutella xylostella; identical to SEQ ID NO: 1051

SEQ ID NO: 1634 - DNA, 422 bp, Plutella xylostella; identical to SEQ ID NO: 1052

SEQ ID NO: 1635 - DNA, 422 bp, Plutella xylostella; identical to SEQ ID NO: 1053

SEQ ID NO: 1636 - DNA, 419 bp, Plutella xylostella; identical to SEQ ID NO: 1054

SEQ ID NO: 1637 - DNA, 403 bp, Plutella xylostella; identical to SEQ ID NO: 1055

SEQ ID NO: 1638 - DNA, 401 bp, Plutella xylostella; identical to SEQ ID NO: 1056

SEQ ID NO: 1639 - DNA, 598 bp, Plutella xylostella; identical to SEQ ID NO: 1057

SEQ ID NO: 1640 - DNA, 598 bp, Plutella xylostella; identical to SEQ ID NO: 1058

SEQ ID NO: 1641 - DNA, 598 bp, Plutella xylostella; identical to SEQ ID NO: 1059

SEQ ID NO: 1642 - DNA, 598 bp, Plutella xylostella; identical to SEQ ID NO: 1060

SEQ ID NO: 1643 - DNA, 598 bp, Plutella xylostella; identical to SEQ ID NO: 1061

SEQ ID NO: 1644 - DNA, 598 bp, Plutella xylostella; identical to SEQ ID NO: 1062

SEQ ID NO: 1645 - DNA, 598 bp, Plutella xylostella; identical to SEQ ID NO: 1063

SEQ ID NO: 1646 - DNA, 598 bp, Plutella xylostella; identical to SEQ ID NO: 1064

SEQ ID NO: 1647 - DNA, 597 bp, Plutella xylostella; identical to SEQ ID NO: 1065

SEQ ID NO: 1648 - DNA, 597 bp, Plutella xylostella; identical to SEQ ID NO: 1066

SEQ ID NO: 1649 - DNA, 597 bp, Plutella xylostella; identical to SEQ ID NO: 1067

SEQ ID NO: 1650 - DNA, 597 bp, Plutella xylostella; identical to SEQ ID NO: 1068

SEQ ID NO: 1651 - DNA, 595 bp, Plutella xylostella; identical to SEQ ID NO: 1069

SEQ ID NO: 1652 - DNA, 595 bp, Plutella xylostella; identical to SEQ ID NO: 1070

SEQ ID NO: 1653 - DNA, 591 bp, Plutella xylostella; identical to SEQ ID NO: 1071

SEQ ID NO: 1654 - DNA, 591 bp, Plutella xylostella; identical to SEQ ID NO: 1072

SEQ ID NO: 1655 - DNA, 590 bp, Plutella xylostella; identical to SEQ ID NO: 1073

SEQ ID NO: 1656 - DNA, 584 bp, Plutella xylostella; identical to SEQ ID NO: 1075

SEQ ID NO: 1657 - DNA, 582 bp, Plutella xylostella; identical to SEQ ID NO: 1077

SEQ ID NO: 1658 - DNA, 572 bp, Plutella xylostella; identical to SEQ ID NO: 1078

SEQ ID NO: 1659 - DNA, 570 bp, Plutella xylostella; identical to SEQ ID NO: 1079

SEQ ID NO: 1660 - DNA, 564 bp, Plutella xylostella; identical to SEQ ID NO: 1080

SEQ ID NO: 1661 - DNA, 556 bp, Plutella xylostella; identical to SEQ ID NO: 1081

SEQ ID NO: 1662 - DNA, 555 bp, Plutella xylostella; identical to SEQ ID NO: 1082

SEQ ID NO: 1663 - DNA, 548 bp, Plutella xylostella; identical to SEQ ID NO: 1083

SEQ ID NO: 1664 - DNA, 542 bp, Plutella xylostella; identical to SEQ ID NO: 1084

SEQ ID NO: 1665 - DNA, 533 bp, Plutella xylostella; identical to SEQ ID NO: 1085

SEQ ID NO: 1666 - DNA, 533 bp, Plutella xylostella; identical to SEQ ID NO: 1086

SEQ ID NO: 1667 - DNA, 524 bp, Plutella xylostella; identical to SEQ ID NO: 1087

SEQ ID NO: 1668 - DNA, 512 bp, Plutella xylostella; identical to SEQ ID NO: 1088

SEQ ID NO: 1669 - DNA, 503 bp, Plutella xylostella; identical to SEQ ID NO: 1089

SEQ ID NO: 1670 - DNA, 490 bp, Plutella xylostella; identical to SEQ ID NO: 1090

SEQ ID NO: 1671 - DNA, 483 bp, Plutella xylostella; identical to SEQ ID NO: 1091

SEQ ID NO: 1672 - DNA, 475 bp, Plutella xylostella; identical to SEQ ID NO: 1092

SEQ ID NO: 1673 - DNA, 471 bp, Plutella xylostella; identical to SEQ ID NO: 1093

SEQ ID NO: 1674 - DNA, 469 bp, Plutella xylostella; identical to SEQ ID NO: 1094

SEQ ID NO: 1675 - DNA, 463 bp, Plutella xylostella; identical to SEQ ID NO: 1095

SEQ ID NO: 1676 - DNA, 454 bp, Plutella xylostella; identical to SEQ ID NO: 1096

SEQ ID NO: 1677 - DNA, 452 bp, Plutella xylostella; identical to SEQ ID NO: 1097

SEQ ID NO: 1678 - DNA, 449 bp, Plutella xylostella; identical to SEQ ID NO: 1098

SEQ ID NO: 1679 - DNA, 449 bp, Plutella xylostella; identical to SEQ ID NO: 1099

SEQ ID NO: 1680 - DNA, 427 bp, Plutella xylostella; identical to SEQ ID NO: 1100

SEQ ID NO: 1681 - DNA, 421 bp, Plutella xylostella; identical to SEQ ID NO: 1101

SEQ ID NO: 1682 - DNA, 405 bp, Plutella xylostella; identical to SEQ ID NO: 1102

SEQ ID NO: 1683 - DNA, 402 bp, Plutella xylostella; identical to SEQ ID NO: 1103
